United States Patent Application Publication US 2025/0235397 A1 - sequence listing, part 13

SEQ ID NO: 15 - DNA, 3326540 bp, unidentified (residues 1-1,663,270 of 3,326,540)
  source 1..3326540: mol_type = genomic DNA; note = Lactiplantibacillus plantarum
gtacaactttaataacaataaacggccagctcggtgcatattatccagcaatagggcgaaaagacaatattgcgctgttttcgacaccccatgcgtcacgaatctaccgcggttgctcatcttgtccataatattccggcttttcagcctggacgggatgggcctgtaaccagctaataatctggcggctgaggtcatccgtcattggtgccgcagctgctatttgtgctttagtaatttggttgacatgaattcccgcagtaattgtacagcttccaactagataacgctgaatccgcttggccattcgttccgaaataaagttatctttatggaagcgaccatcatggctgggaaacttaaccgtttcgggaaccgtgctggcagttagtgtggtcacgtcaccaatatggggattggtcccaccggtaacgacgatcaacaagtcatatccaatcacttggagtgttgcttgcatttgatacccggcctgctcagtcgtaaaagttgccatacttaatccccctcccaacggcgatcagtttcattatgaatatgaaacgcatctaaaattttcatggtttgatgattgaccagatcctgaatggattgcggatgattataaaaagcgggaatcggtggaataatttgggcaccgagttttgccaacttcgttagattttctaaatgaatcacgcttaacggtgtttcacgtggaacaatcacaagtttacgtcgttctttaatcgtgacatcagcagcccgcgatattaaattatcaccgaagccgtacgcaatccccgctaccgtcttcatactagctgggacaatgaccattccgtcattcaaaaacgaaccgctggcaatcgctgcgccttggtcattagcccgataagtagcatccgcgagcgccgttagctgcgcgagcgagtaatcagtctctaactccaagttttttttagcccacgcactcattaccaggtgaacttcaacatctggccgctgatgtaacttttctaataagtcgaccgcgtaaatcgtaccggacgctcccgtgattcccacaacaattcgtttcatcctgacaccctcgtttcggcaattctacaattataaaattagtcatttacctgtctatgataccttgcaaaaatactacaaacaaatcaagtttagactaattaatattcaaaaatggaatattaattagtaattggcatgtcaattgaatctgttatgactacgccaacagcattaataaaagagtcatagatttcctcaaaaatttgaaaagatctatgactctcttttgtattagcaagtaaacaaacaacttgtcaactattcgttatttaactgaaaccagctcaaacaattgctctagtttcaaattctctaagagcagcttgattatactcccgccaatcaaaacgttcaaaacaaacctgttgctccatatctagcacaatcattagtgctgcatcattttgtacatcataatgagcaagttgaccgttctgagcggcacgctttccgtcaataaacactgcgtaattcgggtaactttcaacgtgtttaatttcaacgaatgcacgcccgttgctaccattccccaaaacgatatctggattttcccaatcatctgagctagtaacccatttaccatcaacttgggtttcagcatggaagattttcaatggctcttttacagtttttacatacttgatactgtccttggtctcaattgagagagctaaagtattcgccaaactatttggatttgctacggcatttttaccgctcagcaagccaaaacgtccgcccttgattacatcttgaataccagcaacatctgttccaacaaccggcttgtgtgcaagcaaagcttcaataatagcaagcccttgaccctctgtaactgatggcagtacaacataatcagtaaatgacacaaatttcattggatgctgcaaaaaccccatcatgaacaccgattcatctaatcctaaaccggaaataagttgctctacttccagtcgtattggaccattcccgacaatatataatcgcgtcttcggataattatcatgtactaacttaaatgcttggattaatcctaaatgattcttttcaggagacagtcttgccaccgtcacaaaattaaaataattctgatctacaggatgaaataattgagttgtaataattccgcttggtgtctctgttttagtaagctctatcagtgaatcaccattatccacttgttgctttacctcagataattctttttcaatttcggcgccattaactagattctcaacccatgtaaacttagcagaatcagcatactgactcaaatcttctcgattttgtttatcagctgattgggaaactgaaataattttgtcaaaatattgatagtaagtaaacgtaacacgcagattcttacgatgcttgtatcgcccattaacaattttattatattcatcccacatagtattgtgtagaaagacaaccttttttggaaccggtgataaagcaaataatccagtaatagctttgttgtaaccaccaaagtcaataacttcgtatggcataaagttaccaaagatacgcctaaaattcagctggtacgttgccttcatcttattttggttaactaactttgaattaaatccaaagtggtagctagtgttctgattataagtatcaaagaatgttctagttgcccatgaaaaattaaaaataaagtgcacgctgccgggtaagcgattcatattatattctttttcagggcgcatccgcggataatcaacaaatactaattcatatttattagtgtcaaagtttctagacaaattaataatagaatttgtaatcccgttattatagaaacctccagcataaatcaataacttctttttattattgttgaaatcaagtcgctcaatcgatgacgactcttcaaacaatacttgcactgcacgatcagtcgcttgtccgtcatcataactcaagaattcggatttataatcattgtactgttgttcgtaagtcttggcccatgaatcaaagtatttttgattacagtcatcaagcaattgatcaaacttatccgtgaccagtcccggaagtgtatcaagcgacttgtaaaagcctcggttctgtgcgtaactatccttatcaggaacataaaacataacaggccgtttaatcggcaaaaagtcgaaaaagatactggaataatccgtaatcaatacatccacaccacgtaacaatgtattggtatcaatggcatttgaaattaattgatcaccatatcccatttcaactaatttatcataaataaaataatgtacttttaaaaatactttgtagccagatgggacacgttcctgcaatcgttggacttcatttaacaactgtaaaatatcagcttcagtagtatattccacatcttttttccaagttggcgcatacaagattatcttttcagctggaagccccaagcgctctttcaacgcttgcgtatcttcggaaactagtgtccccagtaagttatcaactcgtggattaccagtaatataaacttcatttggaaaaataccgtttaaatcatggctcgtaattaaatgctcagccgtaaactgattaggcatagctaagacatcagctgccaataaattacgctgaatgttcttatggtctgccctacctgaacccttaatatctaatcccagtgtttttaaaggtgtcccgtgccaagtattcagataccgttgcccatcccttttgataaaatagggcatgaaagaagtatcgttaattaaatactttgaggtagctaaggctttcatatactgacgtgattcgtacttaactaaatatacccgatgtctcttggtatccgccataatatccgcaggaattgtatctttgtctttgtatgcccaatagtacgtataatccggatattcttgtaccatcttttgatacatcgcatacacatttccagtcaaattgacagcatgatacgattccaagaaaacagccttttcttgaactttgctatgtttcacatagtataaataaacattaatttgacgaattgccggcttagttacaaactcccgaattggccgtgcaacaaacttacacgcgagtttgatggtattcatctttcccataatatatatcattactccttgtacttgactacagtactctagccctaatggattagcctgtataattatttgcgttctgatctatgctagtaatcaacttcacaactcgttgactagccgttccttgctcccattccgtgaactgtgtccgaaatgccatcatcttggctgtttcgtttggataaccatcattagtcaagaactgatctaacttggccagaaaatcctgctcattggtgacaattggaccaggaaccttgttgtaatcaaagtagaatccgcgaatatcaccctgataatgcgctaagtcataaggataaaatagcataggtcgattcaagatagcgtaatcaaacatgaccgaagaataatccgtaatcaataaatcactaattaagtacaaatcattaatatcttcatccacacataatttaacattgtcctcaaagccttggatattgatcgactcagctactaggtaatgtggccgaataataagcacatcttccttattaagccttttaacaaccgcggccaaactaaaaggcaagttcattttatacatacctttgcggataaaaaagtcatctcgccaagtcggcgcatataaaattactttgcccatcttattgccaacaattctttttttaatcgctgcaatcgcatcataatcctggcgctgatgcactaaccgatcgttgcggggatacccataatccaagaactggttgttaaaatcaaacgctcgtcgaaaaacgtcttttgaaaactgattgggtgcaattaaataatcccaccgtttactctccgccgtaaaattctgacgatactgacttgtatcggtaccaggcattgaaacttttggaatatcaatccccaggcgctttagcggcgtaccatgccaagtctgaatataggtcgttttcgcattcttcttcaaccaatacggcatccgcgcgttcaggacccagaattctgcaaccggtgccactaataaccatttggccgaaaagcgtggaataatattcaacttaggatacttttcctgggcttccacaaccaactgacgcttaacaccccagactagcttccaatctggatgcgcggtctgaagtgcttcgtaaacgtatagcgggttatccattggaactttaccattaaacgcctcaaataaaacaacgtgttttctcactgggcacacagtcgcaattacattgaacagtcggcgataaacctgactgataatatcttttaatgccattttattgaattccccgtcacacgtttatttttgattgaaattcaagtcttgcttaatcttagtcgttgagatttcaggagtccgtggtaaatagatgacttcagcgtcagtttgttcgcccacgaaatcaaatttaccagtccagtcatcacccattacaaagcgatcaatttggtataatttcacgtcacttactttttgatcccacgacttttcaggaatcactaagtcaacatagcgaattgcttctagtaatgccttgcgcttttcgtatgagaaataggccttcttttgcttgctgtcccagttgaactcatcggttgatagggccacaattaggtaatcccctagtgatttggcacgcttgagtaattcaatatgcccataatgtaataaatcaaacgttccgtacgtaataactcgcttcatagtaaaactcctcctaaaatttcttcgttaatctttattaaatcaatgtacacacctgaatgtaaacaaggctattatatcatgaaaagattgactacacccatcattatacaattcttaatgagccgcgctttgtatattttatattttaaaacaagcgaaatgcatatatcacgcaataacttgcccatattgcggtaattatcattgcaatttgtcatttattcactcgtgccttttatgtcgcaatccatataaattaccgagaagctaatccacaacagtttatcattaaaaccaaacattcaatgcgccacaccacgttttttggcctataattaaggtagtgtattaatgagggagggatgtctatggcaaaacgacgaatcacacacgacccacaccagtttgttaatactgctactgaccggcgacgcttacaattggctgtccaattagccttgccaacctgtgcgcacgtcttagcacgcaattttgcgcgttctagtgccagctcttactggctactaatgataaagacgccggggacggctgccccgcgctttttgaccttgcggatcgcggatcatttgctatggctgacgaaccatgatcaattaaccattagttgggaggctggtaattttgacgccgttcaacggaccttgcgtcaagaattaacaccagccactctgcaacaatacagttatcaactcacgacaactgatattatgacactgcgcttgattctgcatttggaacaacatcagctcatttggttggtccaattagcacctgaaatcgctaaggcctacaagaatcagcattttgaccttcgtgacgactttggtcaggccaaattgttactaggcaacatgaataacaatagtctccaactggtgccagttaagcaaccagctttccaaaatcatcttggacaatacttcggccgcaacctcctattctcacagttcaccagccaccatctattgcgactattgcccaccaatcaatggattcgacccttgctaaaggtgttgccacccacaccaaatctggaacaacaactagcagtcctgtatggcaccgactttgtccgcatttatgttgaagcgattcgacaacaagcacgcttgcaagcgattagttcataaaaataagacccccgctacgttcagcaggagccttattttagttactgattattagtcgcttttaagttttccttaggacctaacaacttatccgaaaagccaaatacataaactaacatcgttgcaatcactagtgtcccgtaatgggatatcaaataaccataaaaatttgacccgatgccgacacccggggtgataaacgcggggaaaccgatcaacgaccctgacaaagcatagttattaacgcgtaacagaccggtcagtaagccacctagaccactcgcaatgctagcaacgacaaagacccgtttgtatttcaagttgaccccgtatagcgccggctcggtaacaccacaaaaggctgaaattgcagctgccagtgagatctcctttaggtgcttatccttagactttaagaagacggccaacaccgcaccaccctgagcgaccattgtaatcgagaggattgcattcaaataactgtgcccattcgtcgcaatatcattgatcacaatgggaataatgccccagtggagcccgaaaatgaccatcgtctggtataaaccaccaataaccaatcctgataaggccgggctaaaattatagacggcgaccaaaccgttggccaagcccttactgataatcgtaattaagggaccgaccaccactaataccactatcgccaaaatcagggcttcgataatcggaataaagacgctccgtaaatacagcggaacaactcgttttaacccccgctcaacgtacacgcctagccatgcagccacaatcatcgggaacacggatgccgaatatgacattaaatgcgtcggaacacctaagaacgtgatttgggccgtggctcccttactagctgccgttatcagacttggatagataagaacagcaccgacaatcgccagcacgattggatctgaacctaactttttggcagcagtaaagcctaggacaactggtaaaaagtaaaacgttgcatcagctaccgcgttaaataccatatacgtcccactcgtgaccgccaagactttgaagcccgttaacgcggccaagattccttttaaaatccctgaacctgccaaaatgccaatcaccggaatcattgccgcggtcataacaccaatgacaccactaatgccattacgcacgtggcttagccaattaacgtcacttgatgcctcctgaaccggtggtactggcactccgtccgcaaattcaggccctagttgtgcgatcactgcatcaaaaacatcgttgactgccggaccaatcacaacttgatactgaccaccggcctttgcaacatcaatgacgccgtccaagttcgcaataaccgcatcgtgcgctagtgcttcatccttcaaataaaatcgcaaccgtgttatgcaatgaatcacgctattaatattttgttgcccgcccacattagctacaattgccgtggctaatgccgagtaacgcgtcgttgactgcggtaccgctgccactaccggtgacgcggttgttgtcactgttatcaagtgagccgttgcgacgactgcaccggccgcgacagcttgtggcagtggggctagcgtcaagtcagtgagtaccagctgagcgttcgtcacgacaatgatcaccgtggtcggtttgtgggcctgctcgatagcagctaaatccatgtcgactaatagtgtgccagccgtcacctcatcaccgaccttcacgtgaacttcaaacggtgccccattgagtgccaccgtatcgacacccagatgtaccaacacttcgaggccagtcgtagtcaccatgccaattgcatgtttggttgttgcgactactgtgattcgaccactaactggtgccaagatgtgaccagctgtcggctgaacaccaaatcccggccctacccttcccgccgcaaaaacaggatccggaaccgttgccaatgacaatacttgaccagtaactggtgctaaaatggatacttcatcgatttttcccataatcatcatcccccatgtaaaacccttaacctaaccttcaaaaatccttaagacgaccgtctcacgtccaatcatgatccattaaaattctatcatcacaattagaccaatctccatcacttaccatcacttcgttagggcgactaaatatcaaaaacaagcatttttccgaatcggaaaaatacttgtttatcctaacgttgattaattatttgacgtcgccattaactaggcggttgcacctaagtgtcgctttttaggcgctactttaactgcatttgcatcctcatccttaaaaccaaacatccaagttaaggcgaaggacacgacaatcgtggctgcggatgcaatcaagaaaccataaaaactaaagtccaagcccttcggattaacaaaggacgtgaagccaattagtgaacccgtaaagccccacatattgacattcatcaagccggtcaagaagccaccaactgccgccccaatactggcagtcacaaaggcccgaccatatttcaagttgatcccgtacatggctggttcggtaacaccacagaaggctgaaatcgttgctggccaagcaagttcttgaatgttagccagctttgactttaaggcgattgcgaatactgcgcccccctgggcaaccatcgtcgctgaaacaatcgcgttcaagtaactgtgacccgtcgttgcaatatcgttggccacaatcggaataaccgcccagtgcaacccgaagatcaccaatacttgatagaagccaccaatgattaagccagaaatcgcagggctcaaattgtagacccacacaataatatttgccaatcccgttgaaagcacagtaataattggaccaaggaataatagaatcgcaccggaaacaatcacaacttcaaataatggcacaaaaatcattcgtaataccgttggaatcactcgttttaaccatggttccaacttacttgctaaccaggcccccgcaatcatcgggaaaattgaatacgtatacgaggcaacgtgtacgggcaagccaaagaagttcgcgttgatccccattcctaaaagcgtactcgtcgctttaccacttgccatcgttacaatagctggataagtcagcaccccaccgatgattcccatgatcaccggatctgcccctaactttttaccagccgtaaaaccgacgaagattggcaggaagtaaaagaccgagtcgcccatcgcattaataatcacgtacgttggtgcggtcgggctaactaacttgaatgttttcagtaacgcaagaattccctttaaaataccagaggctgctaataatccaatgacgggaatcattgaacccgtgataacaccaattaaattactgataccccatttaactttgccccacggcgtcgttggccgctgagctgctgcggcagtctcagcaacagctttagccgtctccgaatcatttgaaaattctggcccgatttgcttgataactgcatcatagacatccgtgacagcaggaccaatcacgacctgatattgtccgcctgcttttgctacgtcgacgaccccttttaagtcccgcacgacgtcatcatttgctttactttcatcttttaaataaaaacgtaagcgggtaatgcagtgaatcaaactactaatattcccggcaccaccaacattagccacgatgtctgcggctaactgatcatatttacccgcttttggtaatcgattctgccgcttagcattaaatgtgttggcgttcagacggcccgtagctgtcacgtcaccggcagcttttgcccccgtaacgacgtccaacgattctaatttatcactagtgttagtcactgctaaaatcactgtggtctgacgattagcggcttgaatagcagctaaatccatggtggcaatcacgtcccccgcctgaacatcatcgcccgcggccactttgaccgtgaacggggcaccctttaagtcgaccgtgtcgattccgagatgcactaatacttccaaatgatcatcaggcgttgtgaacccaatcgcgtgtttcgtctcagccaccatcgtgacctgaccactgactggtgcaacaacttctccacttgaaggttgaacgccaaagcccagtcccatcataccggctgaaaagaccgggtctttaaccttatttaacgcaataacgtccccattgaccggcgacaaaattgttactgtttgtgcctttgccatacccattcctccattcttaacctaacaacagcgcaaccgcttgataaggttgcatcgtcaattgtgctgtgacattaacatcttgataattggaaagtaacacctgtgcaccgaccatttcttccggaagtgtcaccgttgttggctgaccataaaaattattaagcactaataacttttgttggcgatatgtccgccaatagccgaagacttgcggatcatctaagcgccacgattgatagccaccatccgcgacgatcggcatcgtttttcttagcttaatgagccgttgataatagtcaaaaatctcgccactagccaattcatgggccacgttaatcgtcgcctgattagtcggtgtcaaccacggtttaccagtagtgaaaccagccttggcactatcatcccattgcatcggcgtccgcgagttatcgcgcgccttggtcttaacgatcgtaaacgcatcgtgatgactgtacccactacgaattaaagcccgataagcatttaatgcctcaatgtccacgtaatcagccatattgtcatagtccggatcagtcatgccgagttcctcacccatatagataaacggtgttccacgcaagaggtgaatgaccgtcgccagcatttcagcggacttgacacgataacgaccggcgtcaccaaagcgattcagcgctcgtggctgatcatgattattccaaaacaaagcctgccagccaccaccagctgccattccactggcccaactatctaataattgcttcaatcgtgggaagtcgaaggccattcgggaccacttccgtccatcaacataatccgtcttcaaatgatggaaattaaagaccattgagagttcgtgattagccggattagtataaccaacactgttcgcaacggttgttgaagacatctcccccactgtgacgctatctacatcctggccgaagcttgccgcgttcaattcctttaaataatcatgaacaacgggggtgtcagtatacaacgtcttgctagggacccccttaggtgcgtccaccaacttctcagctttaccggtaacattgatgacatcgaaacgaaaaccctgcacgcccttttgccgccagaaattgacaacggcggcacacgcttgtcgtacggccggattatgccaatccaaatcggcctgagtcggatcatataaatgtaaatagtacaaaccagtatcaccaaacggcgcccaggccggaccaccaaatttagattcccaattggtcggtagactaccatcagccttgggaggacggagatagtaaaacttctgatacttctcatcacccgtcaaagccttttgaaaccactcgtgttcagttgaagtatgattaagaaccatatccaacatgaccccgataccatttgccttcagctttgcaacgagttcttcaaaatcagccatcgtgccaaacatggggtcaatatggtagtaatctgcaatatcgtaaccgttatcattttgtggtgagacaaaaaacggattaaaccaaatcatgtcaatattcaactttttgaggtagtcgatcttttcaataacacctcgtaaatcaccgacgccatcgccattgctgtcgtaaaacgacttcggataaatctgataaatcacttgttctgataatttcatgcgctatccctctcatgccagatcttatttcttagttcgccgagcaaaatcgcggaaactaaagcggtccgcccggtgtcgtgattccgtatactggaacgctcgcgcatccgtgaggctcgtcacgcttcgaacaactgccacataggcgcccttactaatagcgaggtgttcgcggtcctcatcagttgccggcgccatcgtaatttccttcgtcgcgtaaccgatcgtcaacccaagctgattttcaaaatacgcgtacagtgagtcttccgccgcttgcttgggaactttcggaacgatcgatttcaaaatataatccttatcaataatagctggttcgccatcgatcactcggactcgtttgatggccgtcactggcgcttccgtcaattcggtaccaagtgacgtaaagtcagcaaccggtaacgttgcatccggttgatagtcataaacaatattttgcgtcttaatgtgtaacttttcggctaactctttataactcacaatgccagaaactggaaattcatactgtcgatgctcaatcacaatggaccctttaccacgaattttttgaatatagccatcctcagccaatgtcgctaatgctttgcgcccagtctcacgtgaaatcccatatagctcacaaagttgatgttcactcggcaaataactcccgatcgggtaaacctccgcatcaattttctggagcaaatcttgataaactaaggccgctttattcacggcaaccacccctttgttatcgttttcatttatgaatatagacttgtttagacaagttgtcaatatttaaataataacccaattaaatttgtagattataccagccggatcaagtctagacatgtctagagttcacaaaatccgagcttatatttcagtattcaataactgcttcataataagtgccaacacctatacagtattggttgaactagcaggatagtccgcaccataataaaaaatcgacattcgcagagcgctaacagcaatctccaaccaatgtcgattctatatctgatgatttcattaatattactattttcgcaataaatctttcgctttcattgttgctacttcttttttcatttttctctttcggttcacgagtgcatctatccagataccattcagcacggcttcgccaactaacaatacggttactattgataataaagagacctcttttgtaaaaacaatgtaaataataaagcctaaaaagccagctcccggaattgccccaaaccaccttggtaagtatcgatctaacatatagagcactgcaacgaccaacataccaatcagaattcctttaaaatcactcatgttgttcctccctaaagtcagtaataatctgttttgctacctctaacgataatttctcatcgattaccaatttcataaccttcgtttcaaacgtatttgcaccgttgtcctcaataaagttaattttttgaataatcgtgtttaaccgcattcgcacggttggataactcacttgataaatcttagcgagttgttttagagaacctgaggcaataaccaattgtttaacaaattcctgatcctcacgttctaaattcacaaaccagtccatagcatccctcttttttaatattgtttattaaactttaacattgtttattataatgtcaataaaaaatcatatatttgataactgatacaatccggagctattcaaataaagacgagtactctaatccaaaagaattacagtactcgccttatttagaatattaacgctactagtctcagtaaatttattagctgacctttagtgattcaatccaaatgcctgattatcactagcatccgcgctagctgcatcactagctgcttgttcttcggccatcaaccgagcgcgttcatgtttgttataccaaggtgaaacagtgaaagccaagacatcgttcatcagataaacggaactattaatgaacattgctagtgtcgccgaaccttgacggaacgagatgaaccagaggaccatttgtgctaaaccagaggcaatccaccagaaatactggttgttgtaacggaggaagcaaataacgccggccgttaaacaaatcgcaaaactaatggcatcgacccatggccggggatcatcagttaaggcaccaataagatagccggagatggcataaacaactaaagttgcgacaattgcgacgatccacgtcttacccgtaaacttccgaatctttgaaaccatgttgacgttccaattagcacttaatagtactggaatatcaagcgttacgacgtaggctaattgttccccaatgcttaaatagttcttagctgaaaaaccaactacgatgaagcaagcggcggagatgacgcctaataatccattgactgacttagccgcattaatggctaacacacaaagaacacccaaagtggtcccaataaatgttaaaatagacaatgctgtaattggcgcacttactaacgtcattacttgacatcctaggctaaaatagaatagatagtagttctgttgtggccaaccttttagttggtgtgataagaatttaaaataattactcaaaatcatgctcctctttccgttttcatatgcggttgtaggtgtctagttggccaaccagtcacgtcacactactacatgtagtgtttccgtttgaaacaacacaatatattgtatcattatcttggccgatgaaaagggtaaaattccaaatttatattgaattgtttacaattaatccaactgcgccccggcaatttggtatttttggcgtgctgatttttttatatttttttgatttcgacctactgatagcgttgtcaatatcaggtcaaaacaatgcgttttgtcgcaatacaatgcttgcagtatactggagaggaacaaacttttagcatcacaatataattaatttttttggaggaacctcatgattacgcttaaatcagatcgcgaaatcaaagggatgcaagctgccggtgacatcatggttggcctgtttcacgcccttgaagactacatcaagcccggaattacgacttgggatgttgaccactttgcctacgaatacatcgttgcacacgacgctactcctggcgaactcaactttgaaggttataagtactcaacttgtgtcagcgtcaatgacatgatttgtcacggctgtcctagtaaagatatcttggtcaaagatggagacttattaaaagttgataccgttattaactaccatggctaccttagtgactcttgccacgcctttgttgctggtacaccatcacccgaagttaaaaaactcatggaagtgacccataaagcgctatacctcggtattgaccaagccgttgttggcaaccgaattggtgatatcggctgggctattcagaattacgctgaaaacgaaatgggttacggcgttgtacgcgaatacattggtcatggtattggaccgacgatgcacgaaaagcctgatgttccacattatggcgaagctggtcacggcacccgtctaaaagctggtatgaccattactatcgaaccaatggtcaatattggtgactggcgttctggcgaaactgccgatgacggttggactgttcgcactttagatggcagtcttagctgccaatacgagcacacccttgtcgttaccgatgacggtcctaagattttatcatcattcgataatgattttgatgctaaatacttatggaataagtaatatcatttaaattataatcacgaacaatcccaccctagtttagtcacttgctaatcagggtgggattgttttagttattatcaacagcacgttcactagctattgtcagaataaaactagttatatgtgtcttggaaaacgtcttgattataagacatgaaaaactgatattggataaattttaacatctttatcctcggtcacaatcaactgattcaaccacctaatatatttattttaatgacaaccgtttggcaaaactaacgctgattcaataacgttctcagccaatcttcatcttttaccgcttattgcaaatcgtcattcaccacttgacgcgctcaaaatcatcttgtatagttagtcccaattaatccagaggaggatcagacatgactcaattaacaagtagtgctttgaataactgttgttgccgaactgcgcgcttatcgcgatgttcggcctgttaagcattgactttttgaggagtgtcatcctaaaaatcaatgtccagcatggctggatattgtactgggcgcgaggaattcattcgaattctcgcgccttttttgtcgcttttggcaccccaccgcagcgattggaggaatttatatgctcattcagcacgttcaagaacttatcggccacacccccctgatggcgttacccatcgaggttccaaatcacagtcacatctatgccaagcttgaaatgttcaaccccggcggcagtattaaggaccggctgggagcctatctgattgaagacggcttgcaacggggccgggttaacgccaagacaacgattattgaaccaactgctggtaacaccagaattggtttagccttagcaactcaagcgcaccacctacgtaccatcttagtcgtcccagaaaagttcagtatggaaaaacaagttttaatgcaagcattgggtgctgaaattgttcatacacctagcgaggaaggaatcaaaggtgccattcgcaaagctgaggcactagccgcaacgatttccaacagttacgtccccatgcaattcaagaatccggctaatcccgcggcttattaccacacactggcaccagaaattctggcggacatgcctgcacctataaccgccttcgtcgctggagccggtagcggtgggacatttgccggagtagcggcttatcttcaagcccaagattcagcaaccaaagccgtagtcgttgagccagaaggttccattttaaatggtggaccggctcacgcacatcgtactgagggaatcggcgtcgaattcatcccaccatttttcgatcaggttcgcatcgatcagacactgaccatcgcggacgatgatgcctttgcccaagttcgacacctagcccgtgaccacggtttactgattggcagttctagcggcgctgcgctagccgctagtttacaacttgccaccaacctgcctgccaatagtcatatcgtgaccatctttccagacagtagtgagcgttatctgagccaaaaaatctatacgaaatgaggactttaacaatgaaatttgaaacccaattaattcacggtggtatcagtgaggacgccactactggcgcgacttcggtacccatctacatggcctcgaccttccgccaaacaaaaatcggtcaaaatcaatacgaatattcacggacgggaaatccaacccgggccgccgtcgaagcattaattgccaccctcgaacatggcagcgctggcttcgcatttgcttctggctccgctgccattaataccgtcttctcaatattctcggctggtgatcacattattgtgggaaatgatgtctacggtggcaccttccgcttgatcgacgccgttttgaaacactttggcatgacttttacagccgtagatacgcgtgacttggccgccgttgaagccgcaattacccccacaactaaggcgatttatttggaaacaccgacgaacccgttattacacattacggatattgctgccattgcgaagctcgcgcaagcacacgatttactgagtatcatcgacaacaccttcgcctccccatacgtccagaagcccctggatttaggcgttgacattgttttacacagtgcttccaagtatctcggtggtcacagtgatgttatcggtggcttggttgtcaccaagacgccagcacttggcgaaaaaatcggctacttgcaaaatgccatcggtagtattttggccccgcaagaaagctggctattacaacgtggtatgaagactctggcattgcgcatgcaagcccacctgaataatgccgctaaaatctttacttacttaaagtctcacccagcagttgctaagatttactatccaggcgatcctgataatcccgatttttcgattgccaagcaacagatgaatggcttcggcgcaatgatctcgtttgaattacaaccaggaatgaacccccagaccttcgttgaacatttacaagtcatcacgctcgccgaaagtctcggagcattggaaagtttaattgaaattccagccttaatgactcacggtgccatcccacgcacaattcggctacagaatggcatcaaagacgagctgattcgcttatcagtcggtgttgaagccagtgacgatttattagcagaccttgagcgcgggttcgctagcattcaggcagattaagctggtgtttcagacggctcgtgccattctcaatcgtgaccccgccgcgatcaatttgcggacagttatgttgacctatcctggtattcacgcgctcgcctggtaccgggttgcccattattttgaaacacaccgtttaccattattggccgccttgctgagccaacatgcggcccggcgtaccgggattctgattcacccggccgcgcaaattggtcaccgggtcttctttgaccatggtattggtactgtcattggtgcaacggcggtcattgaagacgacgttacaattttacacggcgtcactttaggcgcacgtaaaaccgaacaagctgggcgccggcatccctatgtttgtcgcggcgctttcattggtgcccacgcccaactcttgggccctattaagattggcgccaacagtaaaattggtgctggtgcgattgttttagacagcgttcccgcccacgttactgcggtcggtaacccggcccatctagttgccactcaattacatgcttatcatgaagcaaccagcaatcaagcttgattcttatcaaaactgcagcttataataaccggttgctggtatcagttattgtatcaacaataaaacgtacttataaaatcaaaattgattttataagtacgtttttacgttactttgaaaattcattaatttcatgttgcttatcaagtgacaaccaccgtcatcagcgaattagttctaattgtccgtcactagccatatccgccaaaaccatttctttagtgaattcgggcgcatcattaactgtcgcttgcgctagtatcgccgtagcaattgcaaaatccgttgttttttgtagtgaccacccctcaatcaggccagtaataatgccacttgcaaaggcgtcaccactgccgattctatccaagatcatcaatggccgagctttgccgacaactagttgttggtgctgataactaaaaccagcaaaccacttttgctggccaacttgataacgataacttcccgcaaaatagtcaatgtgataatcacgcacaaattgttcatagagtgctgcctcggattcacgatttgcagattgagtgcgatcttcatcatcgggataatctaataacgccgtcaagtctcgtttactcccaaatacaatatccacatatggcagaatttcctgatatcgcgctttaagcgtctcatgggcgactcccgtattgagctgctgacgataattgaaatcaaaacaaacgcgttgtccgttcgcatgagcctgttgtgctaaccgtagcgcggcttggcgaactggcgcagtcagactcagcgtgataccgcagatatgcacaaactgacagccaaccaacgccgccgcaatttcctgatcatcaggaggctgctgacagaatgcgctactgagccggtcctgataagtgacccgctccggccgcgacccgtacccaagttcgacgaaataagcacccatatgttgtccaccaaaggtaacgtagtcatcctgaatgccatatcgtcgaagttcgcccgctgctcgttgaccaagtgcattgtctagtagacgactcagtagtcgcgtgcgataaccgaagtgtgtcaaactacttaatagattgacgccagtgccaacggtgctcattctcagctcatcagtctgtgtcagcattaaatgttcgggcacagtcaagcgaagtaacacttccccaaacgctaggattttcataagtcaccgcccattagaattgtttcattatcgtcagcaattgggcgaccgcttccggttgcgtctcaccagtagttgcatcgataatcgaactgtatacatggggaataatctgccgtaccccagcggcgaccgcaatctgtacaatctgttggaaattagtgagatccagtccaccggttggttctagaccaaattcattgtcagcacacgccgcagccactgctttaaattcttctaggtgagccgttccttgcattggaaagtacttcagtgacgtcccgcccatatccttgagcattgtaattgcggttgcaacgggaatattcgcttttgctgactgcgaactaagtggccccgttgccacattgaccaaaccgacttcaccactcggcgcgactagcccattaatcacagtatcggcttgacctagcaacgcccggctagtcgccacaccagtgaagacttgattaacatgttgtggctggatttctgcggcaactcgcgccaccattgcactttgttgcggtgaaccagcacctaaaccaaccgaaactgcattgttcactgcggcttggtaacgccgcatatcagtaatggcagactcatcactcagatagtttttcgtgaggacacccaacaccacgtgtccttccgcagctgcataacaagcttccgcgttcgtcactgaattagccaatacgttcaaacaaatcccatttggtaaataattaggtgtcagttgcatgtgctttcctcctcaataatggttcgtaatcgttcaacaatttgtgtcatttcagcacttgtcaaagcgcggatatcaaattcaatcagtccttcgttaacacgatattctcgtggataaatggctggtcgaccttgccgtaacgcctgacagattttggccgcttcagcaatccgcacactcgctctaaaaatatcacgcccagcgccgtcttgaaccatttcaacctggacattcggtagcgtttgtaattccgcaataaagggggctaagcgggctttcatcgatgcgccactctcgggaccggttgttaaatattgttcgacggcagctaccaaaccaagaatgttttccttaccgatcttcatggcccgaccgataccgtagttctgttgtcgtgcccattcgacgtacgtttgacgtcctagaaccagcccagatgccggccccgaaattgccttagcgccactgtaaatcacaacatccacgcctaattgtaaataccgacgaagatcgccttctgccgctgcatctaacaccagcggtaaatgatgatcatgcgccacctgcagggcatccgcaatcgttagcatgctcttttgaacagtatggtgactcttaatgtaaaggattgcgaccgtttgtggcgtgatctgcattgccaactgctcagccgtacatcgattagcataaccggccaacacgggttgggctcccgcaaccgcgagcatcacatcaacaggggccccataatcaacatcatgtccaagtggcatgataacctcccgttgcgtgatctgcgttgtatatggatgagtcacatgataggcgttaccacgaccaataataccggccagcacttgcgcaataccggccgaagcagaattgacgatcaacgcgtcctcactgccgattaaatctgccaaataacgacccgtctgaacggtcagttcggccatttcaaaaaagttctgggcgccctgcttttgggcggccgcaacttgatcactgacttgagaaacgcctaaaatcgtcatcttcccatccgcattaattacgggattcaacccgtatttctcataaatatccatgtattcactaacgtccccagtgagtaactatctcaccgatggcacggtttcctttcgtcataattagtttcacttgtctacaccacacgtgtagacccttccggcaataacactgtatgtgggtatgacttgggtgggcgcaattcgctcttctcccgttgaatcaacaacgacctggggagccgtcactgtctgaaagattgtaagatcagcatcgtaaccccgacaaagctgccccttatgggttaatttgaaaatacgtgccggattggtggtaatcataggaataatttcctcaagccgatatcctagcaatagtagcttttccacacaaactgccagactataaactggtccattcagacggttacgataataaatatctgaacttaatgtttgtggaaataggtgtgcggtacgggcaagcgctgctgttcgaaaactgaagctatcggtcccatgaccgacatcaaaaataaggcccttttgatacgccttccgaacatactgtgcgacttcacccgtggaattcacaataccgttcggcttgccgttaaaacagtgtgttaagacatcgccaggccgcattaacgcgatgattgccgccaattcagggggattactaccaatatgaaccattaacggcaactgggccgtcagatccgcttgatattgtttcgctactcggagtggctcgacaccattgtcgccaactactgatttactgacccgtactttcagtcctacaataaagtctggataacgttgaatcgctgttcgtagggctgaaaatgaaagctggttcaaatcggccagctcatcttgagccacaatgcccgtacgcgcaatattaagcaaggcataaacattagtagccgcccgatgcgcctgctggtacaaatcagccacattatccgcaccggtggagcccgcatcaataacggtggtcacacccgttcgataaccgattgcatcggcgtcgtcataataaagcgccgcgtgcgcattgcagtgcgtatgatcatcaatccagccagctgtaatatagcatccctgggcatccaaagttggacagccgactgggacagtcagttcagtccccacttccgcaatgactccgtcagtgattaaaactgccacgggcgcaccgctaacatctcggccattatgaatatataactcagtcatgagcgacctcaaaggaaaatttcgcccacggcccgattgcatccaataatacgagttggtcaggattgatcgttgccaccagattcttccgagtatctgtgtgtggctgttgcacaatttgtaattcatgttgatatttaccgaactgctcattgccaatcacaacatcaccgcgttgaaaagtgtgccggtcatcgttgacacgattaaaatcatgatagcgtttgcgaacctctgttgaccgaatcgttatatcgttgatatcgccacgccgctcgtgcaaattatcgagtaagatctggcgttctacgggctggatgtccgcactaggggtcaccgcaaacgtgatttgatagcggttaagcgcgccgagcttttgcaaatcttcctgcttcgcataggcgttaccaatgagcacactatcaattaatcctgtcgaaaagaggtgctgtacttgtacttgtagcggccagtcacggtgcatctctaaagtcggtaagccatcattgatatcccatggaccgattgttgcgcctggcgccgtgacaaacgctgccgtttcaattccagctcgtttgaaccggcgtgaacacgcaacgaaaaaatcaaagggcaaccccgtcccacgttgcggataaaagttatggcagccataaagaaacggtcgattggcactgtatgacaaaatattagacaaatactcaacgtcgttactcatgttcagttcaagattaagtccctgtgagttatacgataaccaggcttcttgatgcccatcaaagccggcgtctaatcggattgcatccgctcctaatgacgcaaaatagcttagatcctgataggacacacctagttggtcaaaaatattcggggacacatccagggtcgtggtgaagcccagctgatgcgccgactgaataatccgctgatatttctccgtaactcgttctttaccgtcttgtacttccaacatactgacgaacagtcgcgtaaacccataactggcagcgacctttaaataagcctggtcgcgttcaaagacactgtgatctgggtacaacgaaattcctaatgtccgcttcgtcatccgcgtttcccccgttccattgcttcaaaaacttgcaggtagcggttcgcaataattgttgcaaaataaatcgtcactactatggcaatcacagctggtaaatgaagccagccgactagcccgaccgttacaaggatactcagtaaagcacgccacaaagtctgacccgttcgtgctttgatcaaatatgctggcatcaccccccgactcactaaccattcactgccgattacgaatgctgctaatatcaatattccaaacatgctatccctctattctttgctaagctgttgcttctcaaacactttgaaaaacggataatagataacaaggtcaatgacaaagttaacacaagagagtatcagcgccggaacactccaatttgtactaataaacgcaccgagtggtcccggaacagtaaacggtaacctggccatcatcatcggaacgacgccggtgattgtcaacacgtaagctaagcttccagtaattaaaggaccaataataaacggaatccctagaatcgggttcatcacgatgggtgccccaaaaataatcggttcgttaatattaaacagaccgggtaacaaggacaacttgcctagatcgcgcaaataggtcgatttagaaaacataaacaacacaaccaacgctaacgtccctccggctccaccaatccaaataaaccattgcaaaaattgttcagtaaaaatggtcgacagattatgggcgctcgtgccactagtgaactcgctcatattttgggcaatcgacatttcccagaacggccggataacggggtccataatcgcagccccatgaatccctaatgtccaaaatccagtaatgagaagaatcgtcagtagaccaccaaacaaactattgcctaccaaaacacctttgaggggcatcagtagcgtgcttaaaaatgaggaaatattaaagtccaaaagatagcgaatgccccaaaacaacactaggataacggcagctgggactaaggctacgaaggaattagaaacttctggtggtaccccttctggcattttaatggtaatattgcgattctttaaataacgaaaaatttctaccgtcaataatcccgtaataatcgagccgaacaacgacgaggcactcaagttagcaatgttaatgtatcgcccactgctaatgacaccgctaacatttatagtcacgtgaactggtactgcggtcgacacgagaaatgctaagacggctaaaacaccattagttaatttatctaactgataactttcggcaagtgaagatgcgattccaaacgttgcgtacaaggccaagattccaaccgtataacgaaacggcacgtccaaaatttcagcgtaaggcgccaaaaagttagccaccgcttcaatcggcatattattgagaatggtaaagaacgagccgacaatcgttaatggcagcgttgagataattccttttctaatcgcggtcatatgccgctgcgtgccgactttattcgctactggcaaaactttagcatttaacatgttgataaagttatccatattacaccagtcatacaaatatggtatgcgtagaagtcttaggggcctccgcgccaagaaagtttgtacatttcctttcatgagtttaccaatgagtgtattgttaattacgcaacatcagcaatcctgaccaaccaatgctgctacggtcgctgagctaataatcaacatccgttccaccccatatttactttctcatggaacagattcagtgctggtttcgacaaaattcacgtattattttcagaatggcgttccctccttttggcaaacatcataacattataatgttatgatgtaaaaaatagtgaaacccaatcgtattttaaacttgttggttggaccagctgatataaacaccatttttatccctcgcctatctctaaatgtctgaacacaccttttaaggtccgctgaaataaggccattgccccagcattaacggcaaggccccagtcttcacccaacatattcggccactgttatctgcatagcatccgcctgaacttccgacctgataaaaatgcgctgaccaccacagtgcatcagcgcatatcagaccaagtatcggttcaatttataaaacgtcataattaatttgatacgggacaacatccgtttgataagtcgcaatagaaaattcaactagccgctggtgaccatcataccccttacgttcgcgccgaatcgctaatggcgtttgactttcaagcaacgcccgctcactatcagccagagtgacagccctgaatttatcttgaaaatgtgtaatcgtctgaccattctcctgtaaaatcttatacagtgaacgatgccgaagggccgttagtttagtaggaaccaaagtattcggtaaataatgatcgacaaccgcaaatggttttccatctaataaataacggcgcttaatacgtaacatcgtcccttgagactcgctgggtagcaatgcagggacagctggcacgcgttcaattttgatcaactctttggtcaactttccttgctggccgaccgttgccgtaaacgactgcgtctgcgtcaacttgttaaatagatcgttactaataacgcgcgtgccaataccactcttcttctccaagtagccctcactgaccaaaacttcgaccgccttgcgaatggtaatcttgctgacttgatagtaacgttcaagttccccttcacttggaattaagccacctacttcatagtcaccatctagaatccgtcgtttaagatctgcggcaactttttgatatagaatttttgttcccatgctatcgttacctttcacgtacataaattattaatataactctattacatttcgatctaaaacaccagattacaaaactgtcaaaatcggtttattaagcggacttaacaatcaagtttggccgtcagactctgtcagcacttcataattatttgtataaataatttaaataatttttttgagtgccacgcacaaagtcttaataaaaaataaggcctatcagtggctaaacgtgctttcactgatagaccttattcataaatatttaacgacttatttagccaataaacttcgctgcaaattcgctgaattgcttaccagcaccagctaagaatgattgggtgccttcatttgtgatatgaccattttcatcagctaacttatcagtattaccgatgtacaattctggttgttgcatcgttggcatgtctaagaagaccaaagattgacgtaaaacatggtgtgctaagacgccagagataccagagatcgattgggaagcaaccaaagcaggcttgccgccccaaacactttgaccccatggacgtgaagcaacgtccaaagcattcttcaaggctgctgggatgctacggttatgttcaggtgtgacaaagatgaacgcatcttgagccgcaacggcctgacgaaattctgtatattctacgggtgaatccgcatcgtagtcttggttatatagtggcaacttagcgatatttaagtacgttacttcagcgtcgtctggtaacccagcaacgatggcttcagcgacccctttagaataagaatttttacgaatagaacctacaattacaccatattttgtcatatcaaacaatcctttcaaaactaatttcttcgtttcacttactaatagtaagtatatcaagttgttgaaaaagtgcaaccattttagcctatcaattttcaaaatcacttgttcaatcgccaaaaaacgttgttaaatcaagacttacgctccagaaaaatattttagtctatgtctaattaccgacagaaaaggtcatcggagtatcaatgattccgatgaccctttctttattttcaatacacgtctaatcgtcacgcatttcagcgcgatatttgatcaacccttcgtttaaaaccatcaaacatctaagaaatcttgataatcattatcaacttgttcaacatacgccgtggcccatttagccatggcttcatcaaacttcgccgaatttccaacgtatccccgaatcatggccgccgttggactttgcgcgtgagcctttgccaaaatcattgcgcacgtatttgcataggcttggaattgaccccagtctagggttggaatatcaatggattccttcatatcccgaaattgacggacataaaaactcttattttccatttggaaatagcccaggaacgcatccgaggttgcttgtaaaatgcgttgcgaactgacgatccgttgcccttccgtcaattccatggcggccgttaacgctggccgcgactggctcccgactttccgcgttggtaaagcttccttgatttgtaacaccatatggctaccatccgtactcgtcagaagaaccaagtaacatagtgacccaaaactcccgacgcccacactatgccgaataatatcagtaacttcatattgcgacaacagcaaagcgacatcggtccgtacgttcaataaatactcgctaattccggcctttagcccttgataagtttgccgatcaatatggacagaacggggcgcgttctccttaaattgccgttcaccgcgactattagtgaccgtaaacttacgcacaacttgttctgaattacgtttttgagcctttttaaccaaggatgcaattaaatcggccgtatcttcgggagcaccaccgaagttcaagacagcctgaacttcgttatcgcgataaaaacggtctaacgtcgtctgatcaaacatccgtttgagtgcttcccgataactcgcactcgccgcctgtatcaatttttcgaccttttttggtttaaagttagaatcacgagcagctagcaacacactaactaataaccgacgtaaatcccattcccacggatggacgccagcttcgtcaaagtcatttaagtcaaataccagtcgccgttctggtgacgcatagaatccaaaattaccaatatgagcatcgccacaaactacggcgggaatttcagtggacgactggtaatccaaatcgtaatccattaactcaactgatccccggaagaatgcaaaagccgaagcggacattcgttcacgccgcaatggtaatagttctggtaccagcatctcccgcacatgtttcagataatcactggcgtttcgcttcaccggtgtaaatgtccctaatttttcaaatggggtgacttggcgccgcgcctttcctagcgcaattaattcagcaaccgtatgatgttgtcgaatatgagttaaatcaagtggtggcatgagtatcaaatccttttatgatttactaattttattatagcgatatcttccaacgatagaaaataattcagctagttgagcccgcttctcgcgtcccaattattgaccagctgacgccaatttacaagcaattttcatgataaaacggcgattctagttgacgtacccctcaaagtcacctacaatttaagttataaacgataccgctttcaaaaagcgaggaggtcacgtattatggcaaattctgaaaaaacattggtcctagttaaacccgatggtgtcagtgaaggacacattggtgaggttatcacccggttagaacgcaagggttatcaaattgccgccttaaaggttattaaagcaaccgcggagcaacttcaacaacattacagtgagaaggttggtaagccttactttaaggaaatcgagacctacatgatggaaggtccactcgtcgccattatcgtaagtggtactggcgtcgtcaaagcggtgcatcgtttagctggtagcacccggcctgccgaagcacaacctggcacaattcggggggatttctctcatgaatatccagacggtattttacgaaatgttatccatacctcagatagccgtgaaaatgcgcatcacgaaattgcaatttggttccccgaattagccgttaaagcacgaaaagcagacaacaaagtaaaagcctagcttcatttttaacatcacgattacgcaattcgcaattactgatcaatggtctgaacgccattgcgtccagtaattgcgaatttgtatacactggatgttttccgtcacaacgttagtaaagcttccaaagataacccgtaaactggcccaactaactgccaacacgcgccgaaattttcgcactaatcgttcgcactagttatgattaaaccaatcaactaaatggtttgggggaatcattatgaacatagtcgttggaccatatgtacggcggccgcgggctgtcaaatcggacccgcgcaacaccagtaaattttcgatgtttaattcgctacgacgaattgatgaatgcctagtcttgattaaacgtactggcacaccaggattaattgattcaactgcaacgttaggtttgaacctaacccacttaatgggattgaatgtcatcgtaactagtcgtggacgttccttcaccatcattgttcaaggtcggcagcggtcgttcacgctgactggctgtctcattgaagacacgctctacaacgccgttcacccagcacaaccagactatctgatttcactaaatcgccagctcattaccaatagtgatgacttaattgagcaactctatgaccactattagctggccagcatcacgcaccaaaggctaacccaccgtgtgggttagccttttaaattgccccatattaaatgatcagttgaacgactttaagcagtgtcgcggatggtttagccggaatcttcatcttttgaacggctggcattgctgtgtgaacattttgggcaaccggacccacttgcgagcgttgccccgaacgactatgcgcaaccaatacagtattatccgcattccgcgcgtatatcacactattagtagcatcttgtaaatcatcactataaatctgggtcatttggtgatgatagaccgcgctgtgcggatcgtctggctgaattcgctgtccggccgcaattttgcggatatgtaacggggttgcctcgttgatgacccgagtccccttcaggtgtagccaaacttgtgcggcttccaccttagctgccggaaaatcactaagttgtggctgacggattgccttaaacgttgctgcggtactacgctgcagccgacgttgatgataggtccggcgctggcttgtatgccgttcaagctgcacttgttcccacaccaaacaagcaccaaagaggacgataccgacccgtaatgcccaaatcaattttttcaatgattagcccccactttaccataattacgctacttaatttaacatggtcttagctaattatattggcaaagccggtaataatttaattattaatagagcagtcgcaccaactcgccatttctagttgcgcttccccttaaactattaacgatttctaacttgacagctaaactgatttattgtcaaaatcactatttaaatattttattttatgatggcaatacaaacattttgattatcgcgatatacttagacgagcattagctttttcaataaggaggcactactgatgaactcattcaagaacccacttatgacaacaccctatctgctagccataatcgccacactgacgatgctagttagtccactgacaacggttgttatatcagtactgatatggttgtcgggaattacgctggtgtggttacaccgccagcaacgatggctccgcttcttctacgcacccgtgtttttgtacacttttttactagaacaatggtatttctccccatcaacccagccactgacagaaacgattctaattaacctcgcaattcttggcattgccattttcagcacatgggcagcttatcaattacgtcataacgcgtaaattactcaccaagaaaaataagtcccccagatgcggtaaccgtttcttgggggacttattgattgcttcaacagctaccgttaaataacgctcgttaggcaggcttcacttcggctagtttttgatccagatatttcttcaatgctgcttggggatgaaaaccaaccaccttttcagcgggctggccattcttgaatatcactaacgccggaatactcataatctcaaattgttgcgcaatttcctgatgttgatcaacgtcgagcgaagcaaatttcacttgcccatcgtacagttcatctaacgcttcaagcactggttcctgcatcttgcaagggccacaccaatctgcccaaaagtcaaccacagttaacgcggtaccatcagccaccgtcgcaaaagtcgtcttatcgactggttcgatcatatctaatcctcatttccaattgatttccgttctatcatagcatgttttcccacaaaattatgacttccgggtctgaatcacgtacataggtcacaaaatcttggtatatcggtgttctaccaatcaaaaattcgatataatagcgttatagaaacgatataacctaaaggaggaatttttgtgtccacacaaacaatcagtcccgaacaggactccgaattagtcgcttccgtcgccgctgaacaactcggtattaaagccgtgacgttgcgcaaatatagcaccatggttgaaaaacagcttaacgatgaaaatcgcttccgcccggccgataacagtcatcgcttatatacagccgctgatttaaaaacttttcaggcggccatcgaactcgccgaacagggcacaacgttagccactgcgctaggacgggcatttggtgctaaggtcccgacatccaaacaaccggcggcaacgacgactcagtctgagaaaccagcgcctgcaactaccaccaagtcgcccctcatcacgacaaccaccgtcgatcccagcaaaatggcaccagcggccaagccagatggcccgactaatgctgagctctataagcagcaagaaatgatcatccggcgcttagattcactcagtgaacgcttaaaccaagtccttgaccaacttgatcaacaagccagtcaagcggccaaaccttggtggcatttctgggaaaagtagccatatgctggtcaacatacttgctcatcagacttacttcggtagggcaagcattacctaccatccaaattaacgcgtgctgccagtcttaaaaataagctacctaccgttcatcgttccagttaactcgcctagcgatggctgctatcaagtggttctttgtcaggcaagacgcaaaaggcgcccagaattaaatttctgggcgccttttgcagctaattaccatggcggttagtaattagtttttttatcgaactactttgttgcagctaagtgcttttcgtacgcagctttgatttcattaactaaatcctcatctttcaagtcagttgtttcgcgaatgacttgttcgattggttcatccttcaataattgttgtaacttaacactttcactatcattaggatagttgaagaagaacatttcaccaactgtatcaactaaggcgctgtaatcgcgaccacgttccttcaattcccgaattgggcgaatgaaacgttcgttgaaacctaatttccgaattggtgtccggccgacccgttcaatatcatcagagatatatgggttttcaaaccgactcaaaatcttcttttgataagcatggtgtacttcaggatcaaagccccacttttgaatcaacaagtcgccggtttcacctaaaacgtgcttagcttggtcaacgacactgtcatccttgaccgcttcgccaatcgtcttgtagcctttcatgttaccagtataggctacggtggcatgaccagtattaacggagaagagtttccgttcaatgtatggttccaagtcgtcagcataatcaacaccctttaattgaatcttagggtttttcatctgggacttgtcgataacccattccttgaatggttcaactgaaacgaacaatggatcatcatgcttttgaagcggtacgatccggtcaacagcggcattggggaagcctgcattttggtcagcccaagcttgttcgtcttcatttaatgattcataaacggatttctttaatgactgactcccgccaatcatgttttcacaagcaatgatatcaattggtgtcgtattgttgttagcttgccgtaactttaacccgtcagcaattaatggcgcgatgaacttcaagatcttaggtccaatcgcagtcgtaaccatatcggcttgggcaatttcttcagcaaccgccttaggatccttaccgttgttaatacccttaacatcgtgaacttcaatatgtttttgaccttctgcagccaattcaatggtataaccattccgtttgtttaattcgtcaatcaaagtatcattaacatcaacgaaagtaatcttaaacccgttgtcagccaaggtttcgccaatgaagccccgaccaatattccctgcgccaaaatgtacgtctaacatgctaatcaacttcctttaatagatttatgatttcatcttcagattgagcgtccgctaacttagcaacgttggcaacgtcgctgcagtatatggcaatctgagacaagaggttcaagtgttcaccgttcaacccagcgatcccgaagataaccgttacagtcttatcatcatcgttatcatctggattaccccagctcacacccattggtacttggaccacggaaatcccggtctttttaatatacttcatgccatcttcagtaccatgggggatggcaatgaaattacccatatatacggagacatcctgattacgagcctgcattgcatcaatgtattctggttcgacacaaccgccatcgaccaatagttgaccggctaagcggatgccttcttcttgcgtagccacttgctggttcaacgcaatcattttcttatctaaagcttccattgttttcacctacgctatttcgttagttcgttcaaaaatgctttactaattaattgataaagttgctggcgatcgccagtcataaacgtctgcgtattggcctgactttcaatgactagtgcgcttaacttacccatcaaccgattttcaaaatcgctgatattggcgggcccgagcattaggacgattcgctgcaaccgaatcgattggttgtccatactcttaaatggtaatggctggtcaagttcgaaaatcgcacaatatggtgcagtgacttcctgacttaacgtatgcaccaacgccaagttcgtattgggaataccgaccggcgccagtcctaagcggtgtaacaaccggcccgcaacttctagcggatcatgaatcaagttcgaatcaatatgccgcgtgatcttaactagcatctcggccaccgtctcatcatcgttgcgaatcggcgtgatagtgaaacggtctaagatctgtttagcaatcgtcatctgttggtaaacggtgtcaaaatccaagttgattttcgtcggctcatcaaccggtgaatcgatcactttggtgcttggaaaatactgatgaatatattcccgtaaggcagtgacttcgttttctagtaacagtgggctgacaacgcggtaattcaacttaaatcccggtaacgttgtcgtggataaaatcatgtcaaagtcttgtaaattaacttggcctagattaccaatccgtgcaacctcgatagccgtgatttcaggtactaaccgcatcagtcgcgttttcaaaattcgcgccgtcgtcatcccattcgggcacaggaccaaaaccttgagtgcttggtgactcaactgttgctcatacgtactagcaaagtgaatcaacaagtacgtcaactcatcagttgtaaaatcctggtctttaaaaatcgttgcgaagccgcgcaccaccgccgaatacagcttaggatactgttcacggacctcttgtaactcagtggttggcggcacgggaccattaacaccgttacgttgtagggcaatttgcatatgtgccgtcaagttattcaacaagcggtcatccgtcccaaacgaccagttaaagttagtcgcaaccgcgtcaataaactttttgacccgatacgttagttgcaaatcataattcgatagcgacgcgtcttgatcgattcgaaacgtcaagcccttaatttgctgggcgagaaaatcaatttcagctcccgtcaccaccgtcttaatctcagcgggtagttgggtcataattgccagagcaatccgttgatatttcaagaaatcatcccgattgatcccgcgcaaatatgtgacccgacgttcatgctgtaaccgcattactcccgtcgtcaacgtgatgatcaactgttgtagctgaccatccggcaccgaagaaaagtactttttcttcaaacttcgcactgcttgataacagataatcaacgtttgggcgtccagtaagttcaaaaaatacgattgctcatcacttgctgatattgctaagccttggttcaacttcccgattgttttaaaaaactcgtagtcgttgatttcattattcaaaatggtggcaaacagattgcgaatactaccctcagtccccgccacctgaatcccccgggacttcaaccgttcaattgataagtcgtagtcggcgaatggcgttgctaatgccgtcaaatcgtttgaaatcgttgcaacgctcacatcaaagtcaagcgcaagttcttttaattttacggaatggcccgtcatcagtaaccgacaagctagggcgttttgccgcgtttgtgagtcaaacgccggtgcaatcttccgctctgctgtcaattggctttgaaacttggccagggccgtctgtgatccacttagttgaaagtgatgcttctcattaacaattttcaaatcagcattggctaataccaattccaaattactgaactcgcgataaattgttcggcgactactattgagaccggtttcaatctgactcattgaaaggccggcgggattcgctagtagcagctgtagcaactcatcttgacgttgtgtaaacttaaccatgatgccacctcatacgataatggtaataatatcattttatttcaattctgataccatcttatcatatttaggtgaactcaatagatcgtcagtaattaatacttggacctgcgtgtaacgggtctttaagtttttagctgcttctgcacttgaaacaactaataaactattattatcagccaattcgtcaattcctaagttcttaacactcacatgcttgttggctttcttgacccgatccttcatcaaggacgttgccattgtggctgttcctaaatgaccatcgtggtgaacaaagacaatttcatcaacaacactcaaatctaagttagctggtaggtcgtcgggtgcagccgtcgttgcttgtggtgctgcggatgcaggtgcagcatcgctaacttgatcacgagcctttaagttaaccacaacttggtcatactttggactgctcaagaagttgtcaacggctaaccgtaaggcgtgtggtgctttttgagccgcccgatcagctaattcgttttgcgtaatcactaataaaccaggttcgtctttcaaattgctaatcgccgtgttggtgacggacatgctaatgccagccttcttgactttatcccgtaataaggaagcccccattgcggatgatcccattccggcatcacaggcaaagataatatggtcaacatctttgtatgaagcaatcacatcagctggttcagcgtcagtagcactgccggcttcagtattgccgctcttcatatcgctcattttaccttgagcagcggctaagtcatcatcactggtcgacttatcacgtttcaagacaattgcggcaacgataaatgatgctaaggttgctaacgttaccccgataattaaaccaatgtagttagaaatactctttggtgacattaatagtaatgaaataatggaaccaggtgaaggtgttgaacgtaaaccaacgtttagtaaactgaatgtggctgtcccagtaaccccaccagcgataacagctaggaacaatgctggcttcattaatacgtatgggaaataaatttcatgaatcccaccaagaaaatgaataataatcgcactgggtgcagaagccttagcagtccctttaccaaacaaggcaaaggctaataagaccccaagacctggacctggatctggttcgagcaagaacagaattgacttacccgcactagatgcagcctgaatcccaagcggtgttaagataccttggttaatcgcattgtttaagaataaaatcttggctggttcaatgaagacgttggctaatggcaatagcttcatcttaatgatccagtcaacaccggcagccatagcagcacttgcaccagcaaccaatgggccgattgcaaagtaacccaggattgctagtaacatcccgataatcccagcggagaagttgttaaccaacatttcaaacccgctcttaatcttatcggaaatggcgtcatcccacttcttaatgcaccaaccgcctaaaggccccataatcatggcaccgataaacattgggattgaagaaccaacgatgacccccatagtggcaatcgcaccaacgaccccaccacgatgaccggcaaacaaagtcccaccagtaaacgctatcaataatggcaataaataatggaccattggttgaatcatcttagctaatccagcattaggccaccaaccaccagccataaagatggcggtaattaagccccaagcaatgaaggcgccgatgttcggcataaccatattacttagtgcactcccaaatttttgaacgcgtgccttaacgcccagtttctttttcgcaacaggagcgctttgggttgcattcgtatttacattttcactcattaggtaaagctccttcctttttcttaacaacttaatcatatccatcggggtaagcggtttcaagaacttctagttagacccgtggcacaggaaactgtgccacaattaaactcactaattcacaaagttaaaatttggcacagtatcgataaaaacttttatatcggcaataccagcagactaattaaacttttttcgtcagctatgatttaattttcacaatcaaattcaacattttatgcagaaaacacctggcaattctctcatcattttattatttaaatgattacgaatacgatttaacgttgaaatccccccgcaagctcctatacttataattaactaaggagtgacctatgtaatgaaaaaagacactgattgtaccgaaatattggttgggaaagctgctagcatggatggttcgaccatcgttgcccgcaacgaagatggctacggcccaattaatccgattaagtttattgtgcacgaagcccacgaccaaactaacgccagctacacttccgtaactaccggcgtcaccgttccgctgcctgaccatgcctaccgctacaccgcaaccccccaagccgatcaaagcgatgggcagtacgaggaagctgggatcaacgaattaaatgtcgggatgagcgcaactgaaaccactgccaccaatgcccgcgtactcggttatgatccgctcgtccatgatggcgtagatgaagaagtcatggtcaccctcgttttaccctacattaaaagtgctaaggaaggtgtccaacgcttaggtgccctaattgaaaaatacggaactggtgaaagcaacagtatcgcctttaacgatcacgacgatatctggttgttcgaaaccgctggtggtcaccattggggggcagttcggatgcccgaagacacctacgcaattgttcccaaccaaaccgtggtgcaaaagatggatctcaacgataccgacaatttcctaggtgccagtgatttagtggacttcgttgaaaagtatcacctcaacccaacacccggtcactttaatttccgtgaaatctttggtacccaaagtgaggcggatgcttattacaacactccacgaacatggtatggtcaaaaactatttaatcccgaaatcgaacagaatcccactgatcaaaacatgccgctattccgacaaccaagcaaaaaattggctattgaagacgtccagttcttcttatcttcacactataacgggacgccttacgatccatttggcactttcgcttctggtaacgcccgtgaacaaacacgttaccggtctatcgcgatggatcgcaatcagtgctcatctattctgcgaatccggaatgacgtgcctgctaagcaagccgccattcaatggatcgcactaggtttcttcgcttacgccccatacgtgcccttctttaccaacatcaatgacacgccgattgattatcgcaatacaactagcacggtcagcgttgataacgtctactggttatcaaaaacgctctccgtcttgattgaaccacactggcatgaattttctgaaacggtcaatgcctatcgcgacgggtgccaatcatatgcccgtggccgggttgccgcaaccgacgcagccattaccggcaatccgaccgatttcttgaccaaagccaatagcgaaaccgccgccgaaatttccaaccggacccatgcgttgtttgatactttggttaagcaagggctgttgttatcgaaaacgacttgggaaaaaggacaaaatctataaaaaaatcatcaacgacgtgctactggaacatttcagtagcacgccgttttgtgtttttaattatcattgatatgctgatgtgctaaccgatacccatgctgctcacgataatcattgggagttatcgccacttcgcgtttgaacgcagtaaagaaactactattatttttatagcctaattcagctgcaatttgttcaattcgcttattagaaaatgccagcattcgtttggccagttcaatacgaataaatgttaattgttccaaaaagctcttgttgaacagtcgtcgacacagccttgaaaaataatttttgtcatatccaaagtaacatgccgtttcttttaacgtcgcatctgcgttatgtgcgactaaatacgtaaaaatcatccctgattgcgtatcagcattaacatgtcgaatatttttaccaggaaaataagaatccgtaatcgaaatgcgttcctcatgatgccgcaatagttccgtcattaacaatcccaccgtcatctctcgttgataatcaataaaaacatcttgcaaatcttgccgttctaactccgtcaacaaatcaaagtaccgttgggttatctgatttcgcaattggcgataaacaataaaccgcaatgtccgctcacccgcattcattaaatcatgaaccattgggttatcaccgacaaccaccaagtttaatggcgtgggcgcatgcagacgttccgaaaaaacacttaactttactggtgcccccctattaataatattaattggctgcgcagatgaaaccattacaatatcatctggggacagtgccacgtactttccgactaatgttaattcagcgaaatcgtggcttacgataaagcgaatgtgaaactctgaactgcaatttggtgaacttgaaagatcattacggcgtagaccaataaaatcgctttctttcaattgataattgctatttaccgtctttatagaagccatcactatcacctgtcaatcccttaaaagatatataaacatattaataaggatattatacactatcaacttgtgcatattttagctttatactaactttgtaaattcgaataagggagtgcaactattatgactaatcaaacaattgatactgatgtcctcattgcaggcacaggtggtacaggactagccgctgcgtacgcagccgtgacccatggacttaaagtcaccgttattgaaaagcaatcacaaattggcggtaacacaaaaatctcaagtggatttttcgccattaatagccgtgaacaacgggaagccggtatgcacctaacaactcaggaggccattgcacaattagccgactacaatcactatttgtccaatggtaccctacttgcgcggatcgttaaccgctcggcagataccttagcctggttggaaaaaatgggaatggaaatcaaactcaacccaactgccaatacgactcagtttgcgcatcgtaataatgattatcgtgggggttcctatcatatgtaccaacataaagacgagagctatcagcgcatccaacaaacattaacgactgccggtgtcgattttcactttaatacgacctttactgacctggtaatcaccaacggagcagtcactggcgcaacagccatgaccgcttcaggtgaccagctaacaatcaccgcccacgcagtcgttgtggcaaccggtgggtacggtggtgatcgtgaaaaagttgctcgaaccatgcacaccacgcatctaagaaccttaggtgttccaaataacggtgaaggtctggctgctatggttaaagctggcggtactgacatcgacagccatgcgctcattcatgctgcgcaactagctaaatcccaagtcactcaaaagacttctcagcaacaccttgctggtttttccggtaatccattaacccaattattattaacccctcaactatgggtcaacatgcagggacaacgattcaccaacgaagatgtggtctacgataccgttgaatgggcgaacgctgcttggtctcagggtggtcaatatctctttatcgtggatcaggccacgctcaatacattcaccaccaaccgcaatcgcgaagaagtttctcaagcaggaccgggcgcagcgactggcagtggtgactttaccgcattagctgaagaagctgtcactggtaaaacagcttttaaggggaacacactcactgagctagccactaatgctggtatggatccttcaacattgagccagaccgtcgctacttataatcaagctgtcgcatctaaaaacgacagtgaattcagtaagcgcttgcagtctttggattattcaattagtgatggtcccttctacgccttcatctgccaagccgcttatcttggtacggtcggtggtgttcgggtcaatcgaaatctcgccgttttagatgacgatttcaaacctattcccggtctttatactggtggcgccaatgctggcggttactatgagggacacagctatcctgcatttgaaggacttgcctctggctttacttggacgtcgggccgaattgcaggaacaagtgccgcggcttacgtcaaagcaaagttcgccactgtcaactaaatcataaatccaatattgattcttttatttaaggggatgtccagcatggaaacaacaaaatcgatatcgggaccaagtaaaagctacgtttctaagacccggattggggttcttgcagtcagttcaatgggtatggcggcactcgcaattaccccatcctatgcagcaatcgcatccaatttttcactcagtaatacgagtgtccagatgctaacattattgcctaatctatttatgatgttagcagggttgattattggcaaactaacggcaaccaagctcaatctcaaaacattaacccttagtgcggcaatcttagtaattatcggtggttttctaccattagcctttcacacaaactttatgtttttgttattttgctcgtgcttagtcggtctaggtcaaggcgcctgcaccaatttatcacaagtcttaatttctcaaatgctaccagaaaccgaacgccagtccactatgggtttaacaaccaccttcaccaatctcggtggtattgtcttcatcatgggtggcggccagctagctgcaacgaacggttgggtaaataattattggatttacttattctcagcacttattttgattgtgatcttaacattagtgccgatgcatccggcagcagtcaatgcagccaacgatcaggacaccggtgaacagattaagctcaacaaatacgtcttttactgtgccttctggggattctgcacgttactcttaaataatgttttgaacaacaacatttcactatttgttgctgaagaagaacttggcgcaacctcacaagccgctctaacgtcaaccgtttcattaattggggggatgctatgcggcttgattgttggcgttatcggcaagcggttcaaatactcatccatcacaatctcgtttatcttatacggcctgtcctacctgttaatcggtcttggacattcgctatggttagcctttgtaggtagcttcatcgtgggtgccgcaatgagtatcgccatgggacaatttccatatttgatctcaatttcagttggcaaaaacagtgtttcgatggccctaggtgtgtacgtcgcgatttactcaatcgggggtgtggtcagtcctttcatcgttaatccattgactaaattagttgctggtatgggtattaacgtcttcgtagtcagcggctttattgcgctgatcctagatgtactatgtatgggatttcaattccagaaaaaattagtaacggcggcacaataaccgacttgaccgacaaagttaaaaagccgtgcttcacaacgcaatcgttatgaagcacggctttcagttcatttttagcttaattaaaattaatacttcttgcttaacttgctagcagccgcttcgtcaatgataacggtaacgtctggatggttttgcaagatacttgctggtaattcaggggtgtctgggccttcaatcatacccttgaccgcatcagccttgttttcgccgaatgcttcgagcaataagtgcttgctcttcatgatggaagctaagcccattgagaaggcttgcttaggaacatcattttcgctggcgaagaaccgcgcgttagcttcaatggttgattcagttaaatcaaccacgtgcgtcgtaatatcgcgaggagtacctggttcgttaaaaccaatgtgaccattacggccaatccctaagatttgtaagtcaattgggtgttcgtcaatcactttgtcgtaacgcttaacttcagcttctggatctgaagctaaaccgtttggcaagaatgattccttaaatggcttgtcattgaataaatgagtttgcatgaagtatttataactttggtcgttgtctggtgcaatcccaacgtattcatccaagttaacggatgtgcagtcactgaaatctaagtcactattaacgatttctttgtaagttgtaacgggtgtcgaaccagttgccaacccaaatactttcgcaccattgtctaaagcattcttaaatactttgaaaccttcttttccgccggcagcttgatcctttactacgataactttcataattaactgactccctctttgtttggtatagtccaattgtatattggtctagactaaaattcaagaggtttgtctgaaatatttcacttttattttttgcaatcgttatcattgttaaactgtcaagccaaactcctttaataaattaattgtatttttcgataattttgcctatacttaacatgttcgtaactccgtggaacgtgagaaattccacgactagccaaggctgcaaagtcattggctatttttttgcgctcatacctctacgccaaccatttatttgttcacatttcaatcaaactatccaatatttacattgcaattggtaacggctaaaattagctttgtatggaagatatatattacataaagggaggtgttaaccgcgaatcatgtcaagcaataccggttaatggccggattctcacaaaaagaactcgccagcaagactggcatcacccgtcaaaccctgagtttgattgaaaagggcacctataacccatcactgaaactctgcctcaacctctgtcacgcactcaaccaaacactcgatactgtcttttgggtcgaacccagttaggagatccctgccatgaaaaagattcgtgacgaacgtttaattttacaaaatttcaagaacatccgtaccacgttgttaattgaaaatagtgctatcttactgattttattttggcaaggctggcaaaaaaacaatcttcagaaagcctttacgtacgacaatccgttgtatattgtcctgatgattgccgtttttaccatgatcattttgtctgttaatgtcagcaccccaatagaagacaaacccaaacggtcatggcgctaccttggcctgtgggcactcattgaactaatcggtttcaccgccctattctacttcctgattgcgataaatcagccgttcattagtctgatcgctggtatcgccctgaccaccgtcactagcggtatcatgctgtatagcaaccacctgcgcgatcgtgattaacatcagatatcacctagacggtaccattctaatcacatttgcggtaaactattcccagaaattcaacggacacgaggtttttgctatggaaccaacttttaacaaaatgactgcgactggttaccatgccatcgaacaggaaattgaagacttaaagcaacaacggcccgagcgaatcagaattctggctgcggctgcggcactaggtgaccgttctgagaatgccgaatatagtagtgccaaacgggacttaggtcgcttagaaagccgcctgcgttatctcaacaagcagttgcaatacgcccaaatcgttcaaccagctgacaacaatcaactcgatatcggtaaattcgtgaccatcgaatttctggatgatcatgaccaaatcacctatcaattagttggaaaacaggaagccaatctcgaacaacaaaaaatctcattcacatctcccatcggtcaagcgctcgctaatcatactgttgacgatgtggtcactgtgaacgcaccgaacggggcttatcaagttaaggtaatcgcggttaagcgcgcgtaataaaatagttatgccaatcgattggaagcttatctttatttttttgaatcaaaaatacactttctgaagcgtatacgtgctaaaataaagacagtaaaaaagccggtacgttaataccgacttgaatcaaggcccgctctaagagcagttggctttaaatttagataatcaaagaacagtcacccaataccggccaaagttttggggtggctattttttgtttctggagttccatacctgatacatcgctagtgcgatgctcaaaatgatttgcaagaaagcaaaccaaacaagtagagtgaccacggctgaaaacctttcctagtgtgggaaacgtatttgtcatactaccacgacctttcaagatgaaaacagccaaccgcccttaaaacatacctataaacatattttaccagatagtggctcacagctacacagttagcattttgtatgattaaaaaagccaatcgctactgcaccatgcattgcgattacgctgatatcacaaaccaatcatcaacaagcagttgcccataaaaagatagcgacgagttatcatcacaacgtcgctatctttttatatcattcaaattaaaattcttggtacactgctggatcttgattattcaagcgaccatccacttggctcaaaccattaattgttgccatatcagctgcactgatttcaaaatcaaacacgtccatattacctgcttgacggctcggcgttgacgactttggaatcggcaaggtccctaactgtagttcccaccgtaaaatcaactgaccaacatttttatggtagtgcactgcaatctctttgagcgtctcattttgaagcatctcactggcccggccaaggggactccaatcttgcgtcaaaataccgtgtgcttgatcataatcccgttgtgcctgctggttaaagtacggatgtaattcgacctgattaatgacgggtaaaacacccgtttctttgtttaatcgttctaaatgttctggtaagaaattcgagaccccaatcgaacgaatcaagcctaacttctgggcatcaatcagtgcctgccaagcttcaacataatgatcttccttagggttaggccaatgaattagatataaatcataataatccaggccagctcgatataatgattcttgaatcgtattgatagcttccgtgtaggtgtggtggcgaccaggaagttttgatgaaatcaagagttccgaacgcggtactgacgaacgccgaaccgcttcaccaacagcaccttcattttcatagttaaaggccgtatctaataatcggtagccgcgatcaatcgctgagtcgatcacttgcacaccatgagcaccattcagtttatatgttccaaagccaattttaggtactgttaaaccatcacgtaacgtataagtttccaacttaagccacttctttcttttaaattaaacgatcagccaaggcatcacgaatcgctgcttcaaatgttgccggccgtgtcgttggggcatagcgttcgagcacacggccatcacgaccaatcaggaattttgtgaaattccacttgattcggccatgtcccgccgcctgtttgaggtaagtaaataacggatcagcgtcatcaccattaaccatcacccgtttggtcatgggaaacgttaccccgtagtgccgttgacaatagtcatgggtctcatcgtcatccgccttttcttgatgaaattgattggatggcaatcccaagaccactaggccctcctgctgatacttctgataaagttcttctaatcctttaaactgtggcgccaggccacagttgctagccgtattcacgattagcaagacctgaccgcgatattgtgacaagtcaagtggcgcaccactcatctcagtttctgtaaaatcatacactgattctgccatcgagatccctcctaagaatattaaccaaatacattgctttatccatagtaaaccacaaaattgtgacttttcatcatactttgctttagtttccggaaaattgattgcactgaatgtcattatccgttacactaaacgtatcattcatagcaactggggtgccatcacggctgagataatacccattgaacctgaatctggacaatgccagcgcagggagcaatgcttttatttggggaaccatcaattcagacttagccgcctgccaccgataatcgtggtaggcgttttttgtcgcttggatgcgtgaatgacaaactacttttgggaggatttaacaatgaaatgggttaaatcatggtacttgaacgatattattttactggcactaattggtattttctttggtgccatctttatggggactaattttgtttataacattttaagtgcggccctgacaccatttggtctaagcggtctggctaatgaactactacttggcttatggtgcatgcccggcatgttagctggctacctcattcgactaaagggttcggcaacgctaggtgagctcctcgcagcaaccgtcgaaatgtttttcggtggtcaatggggaatcaccacattgatttctggtgtcgtgcaaggatttggggccgaactaggttatatcgtcactggctacaaacactatgactggttaggcttaacggctgcggccgcaacaactactgtggtcacctttggctgggaccttgcccgtaatggttactataaattacagctatggctcttgattttatacgtggtcgttcgctttatttcgatgtttgttttcgggggtctgttaactaaaaccatcacggacctacttgatcgcagtcatgttttaaaatcaacgcattaatacactttataaaatggaggctttctcgaatggctagtatcgcgctgaataatttaacttacacctatccacaggcgtcgacacccattctggatcgcgttaacctaacactaccacggcaaagcttcatcctattgacagggccatcgggaacaggtaagtcgacgctcctaaagctgattgcaggcttactacccctgactccagattacggcaccattacctttgatggtcagtcattaactgctagcaccgctaatcggcgcgctcagcacgttgccatgatgtttcagaatcctaatcagcagtttgccatggataccgttgaaaatgaactaattttcgcacttgagaacttacaagtgccccgtgaccaaataccggcccgcttacttagtgcgcttgactttgttggtatccgaaatttacagtcacgactattaaatcatttatccggtggcgagaaacagaaagtggcccttgcaatcattgtcgctatggatagcgatgtcatcctactagatgagccctttgccagtgtcgatccgaccgcacgagccgtcttgttagaccgactcgtggaactacgcaatcaacatgggaagacaatcatcttggcggatcatgacctaacaggttacgaacagctcgtcgatcaagtcgtccaaatcaaggaccagcacttacagctcattgaccgtaccacctggtctgagttattttcagcctttactgagcagccacaacggtcatggtcagcaccgcaacgcgttgaacgcccttgttttcaacttgatcacgtcactttacaggcaggtgatcgtcaactattagtaccgacaacgcgtcaattgttagcacaacacaatacgctgatcacgggtcctaacggtagcggtaaatccacgttatttgaagccctcgtccgtctgcacccctatactggcgaaattcgttacgaagggacacctatcgacaagctaaaacgcaaacgctatgctcgccacgtcgccttgctttttcaggacgctgagacccagtttttaaacatcacggtcgctgaagaactggctcaaagtaaacgctatgcgtatggcgactactttaccgcagaccgtattcaaacggccttagtgcaactcaacttatccggtcgtgatgaacaagtcatctatactttgagtgagggacagaaaaagaaactacaaattctgctcatgttaatcatgcagtcaccagttctactcatggatgaacccttaaaagggctagatttgcattcgatcaatgccctggtcgcgttattacagaccacccaagcggcaactaagcagacactgattattattagtcaccagttaaccggcctgatgccattgattgactatcagctacactttgaaaatcaccatttagattgggtggtgcgatcatgaatcctagcatgaaattattattactactcatcattgcgctagaaatttcattcacgacaattgtaagtttgaacgtggcactgattattctggcactgatttacctgctcggtcaccgaactcggcttcgaacattagggtggttgctactcattccgttgctaccagcaattggactttggagtacccagtacattaacggtagcggtgacaagactttgatggcctgggtcctgttcacacgaatctatgcgtttgtttttacgggcgctacttttacgctcacgactgacgtcttacaattaaccgattcgcttgagcaaaactggcatttacccgccaaatttgcatatggcgtcctcgccgcgtataacttggtaccacggattcggcacgaagttcaagtgattcgggctgctggtctgatgcgtgggcaggtcctgtccttctggtcgccacagctctactttaaagcaattttggtctctatcaattggtcgcagaaccttgcccaggccatgcgctcccatggttttgtcgaagatgcaccccgcactcactatcgtcagattccactgactaagttggattggaccattgtgattagtggcggcttgcttttacaagtcggcgccttcgtcattccgtggcgctagtggtctcattcactgaataaacactaaattaaaacaggttttctcaattatgagaaaacctgtttttgggtaatattccccacttaggtcgggtcacaacaataacaagttgaccttaattcatgctttcagccgatcaatttgttgccgtaacgcctgaatagcagctgtagaagacgtcgggtctgccattaattgatcatacttgaactgaagtactgctaagtcagcttctaccggttgcggcgctttaacaactttgtcaggatcaactaattggtgcgtctcgaattgcaatacccgagtagcaacggcctggcaaaacggttcatcatgtgaaacaaaaattacggttccaggataattttgtaagtaatcggccaacgcatccagcgcgtccacatccaaataattggttggttcatctaacattaaaacgttatattgaccgactaaaatacgaattagctgtaatttaactagttcaccaccacttaacgccgataccagttgcggataaaagcgtgctggcaggcccaacgcgcccatgacgttacggatcgtttgattcggtagctgactgacttgccgcaccgtttgccacactgactgtttaccgtcgagcactgtcatatcttggttgaatactccgactcgtgccgccggagccaatcgtaatcctgacacccggccacctaaaattgcacgcagtaatgtggtcttaccgctaccgttgggccccacgatagcgacccgatcatgtggcctgatttgaaagtcagcgtgtgctaacaacgtttttccatattcagccaatgtgacattaagaccagttaccacggtcttacctgtaaacgtcggaaaatctgtcgcgactaacttaaagcctgaagtcgtaaagggcttagcaacttgcggttcccgttgtcctcgggcgaccatgcgtttagccgttcgttccatcttggccgcggtagcttccctagtcgctttcgtcttggcacgctctacttgcgacattcgccgattgccttttcgaatccgctgcgctttttcattacgttgacgctgcgctgctagtaactcacgctgatgagtgttttggcgctgatacgcggcttcctgagttgcgatttgctgcgcttttaccgtctgataatatgcgtaattgcctgcatatgcggtgaatttttggtgttcaaccgcccaagtctgtgtcgtcacagcatttaataattgccgatcatgtgaaatcaacaacagcaacccacgaaaacgttataactgattaataagccattgctgatgtgtttcatccaaattagatgacggttcatctagaattaaaattgttggccgggcgctcaaagcctgccgaattctggttagcatagcttgaccaccactttggtcaaaagtcggtgcgatttgggcaacatagctgactggctcgtccaccataatttgtcccgtataatcacgatcagtacccgtcagtaaatgggccagtgttgatttaccagcaccgttccgcccaaccacgccaattttatccccggcattggcgactaatcggtcaattgtaaatagtggccgtcccgccatatctttttgaatattttttaaattaatcattgtcattaataagcatccccttagttgcagggactaatttatggcacaaaaaaacgtcctcaaaatgagaacgctggcaattgattccaccagcaccctaattaatcccaaaacggacagtccacccctatcgctaggcatggctctgttcagttactagaattaattagttgcgcattggctgaatacctcgtgttttataagttactttgtagattagcatgtttaatttcaatttgcaagaaccattgttttttaaaagttttttcagtaaactaaaattactttcagaaagcaggtgtcagcttgaaaaagatcattgcaattaccggcttcgcaatgctaggtggtggtctccgggaggggcttagtttgctcgtcacttggccacagcatttctggataacgtgtctgattaatattgtgggagcatttgttcttagcctgattactaacttgttaccagcgcggttacccgtctctgaagatattgttatcggtatgagtgtcgggttcgttggtagctttactactttttccaccttcacttttgaaacgctacaatcgtttcaaagtggtcatagcgttttagctttaagttatgtcgctgctagcttagggttgggtttgctagcggggctagctggaaacttccttagcacctattggctaccaaaggaggaattttaatgttagtcctagtcggattggccggtgccggcgcagctgtaggggccttaagtcgttacggcatcatgcgcttagcactacctctcaatcgatggccgttaccaattgccacgttatttatcaatctaaccggcgctttattgctcggttggattttaaccagctcattaccgcccaactggcagatttttctaggaactgggattatgggtggctatacgactttttcaacaatgatcaacgaactcgtgttgctcggccgtaaccaccatcaacgggtcgcctgggaatactttggcttgagtctcgtcggtggcctagtcatggtttatctcggaactttaatctaactcaaaaaacaggaagtctcacaaaactaactgagatttcctgtttttgttcaatgactatttagttccaacaagccgcctttacggctagcgtgccgatgacactagttttaacaacgctcatctttatctttcaaattacgtggtggcatttccgaataatgcaacgccggcaatcgccacgacgatcaggcctaaccataatgcgattttaaataaaaacaacccaatcacaatcatgaacacccaaccgataattttaaaaccaattttaaagataactttgagcaaccataaaccaattactaaagcaatcaataaaccgatcatctatgcgctctgcgaagagagcttccctccttacaagtcccatcatgggtaccttgccagttagtatagcacgcgctatacagcggcagactgattgcagtcgtaaattaagagaagcttaattttgcaacgccgcaacttgtcgcaccatcgctaattcttcgttagttgggatcaacatcactttaatcttggaatctgcgccactgatgagtccttcttgacccgcttcatttaatttcggatccagggtcacaccaaagatgctcagttcatcaataatttgctggcgcaaggtcgcattatgctcgccaatgccgcccgcaaaaatcagcgcatccgcccgttttaattctgtcaaatagctaccggcatacttaacaatccgattgacaaaaatttcaacagctagttgggcttggggattcgtggcttcttgcgcacggatttcacgcatatctggtgaaattcctgagattcctaacaacccagactgattgttaagcatcatcatgatttcattcggatcatcgatctttaaagctttcatgaggaatggcaatacggccggatcaacgtcacccgcgcgcgttcccattgtgacacccgttaatggcgtaaagcccatcgatgtgtcgaaggcccggccattttttacggcagctaatgacgcgccactacctaagtgtaacgtcaccaggttgaggtcatctttcggcttagccagcagttctgcagcccgaccggttaagtaaccatgcgagataccatgttcaccgtaacggcgaatatggtatttttgggtcaattcatatggcaaactgtaaattgcattcatttctggtaaatcggtaaagaattgactatcaaataccgcgtactgtttaacggtcggtaaagcctgagccatcgtctcaataccacgtgcctccatcggattatgcaatggtgcaaagtcactaagccccttaatggcctctagtaccgctggcgtcacttcaactgcttgcttgaacgtttcgccacccgcaacgactcggtgagcaactgccgtaatttccgttaatgagtcaataattgctaatcgctgtaattcagccaataacatctgcgccgcatgattttgatctaaattatcgactgtcgtttcaaacttttgatggtcaccatacttgatggtgaaaattgaaccgggcatactaatccgttcaacgagaccactagcaaccaccgtttcagcaggcatagcaaataattgccatttcaatgatgaactacctgcgttaataattaatgttttttgcatttctcaatcaactcccatgtaatagaataccgaacttttctgaaaattgctcaacttttttcaatcgtgtcatttgacatcttaattcattcgctagtcccaatcttccactgttaactaaccagaacatgttattattaagacgttaacttttacagattagaggaacccattaatgacgaccacaaccgatgtcgacctagtccaaactggattagcgcacttaattcaccacacgcgtaaacaaatcgaatcattaactaaagcattagaccacctgcctgatgtcagtgatttgcaactcaagggcacgttattgaagacgtatgctagccagatcgaagggcaccatcatttcgtcgaattgcccgactatcaaggccaccaactcagtattaaactcgatattaaaaaatcaattattgaaaatgccgaggattattttcatcattatcacaaaagcaaacgcggtcaagcgaccgttcaacaaaatttggcgacggccaagaccgaactataccagcaattagcaactcaagcagctttcgaccctaatgatccacaagcggtcgccgcgcttaagcaaacactgattgctgcgggcgcgattcatacccacgttttacactcgtctaaggccccaacacccgcccatccccgccgcttttacacgcacgaccacgtgctggttgaagttggtaaaaatagtcgtcaaaacgaccacctaacattgacggcccgtaaagattactactggatgcacgcgggtggtgaaattcccggttcacacgtggttattcacagtaatcatccgagtgaacaaaccttgcaggaagcggccgtactgacggcctattacagtaagggtcgtcagatgaaccgcgtacctgttgatgtgctcaccgttggccagatgcgtaaacccaagggtgctaaggctgggcttgtcacctttagtggtcctgcacgcacgatcaccgttgtccctgatgctactttagccgctgaattacgtgaccaagaggatattcaccatgacgccgattgaggcctatattgctaacacaccacaagcctatcaatcgcaattaatagccttacagcaaaccattgcaacggtcttaccagaggcgcaagagcagttaaagtaccagatgccgaccttatattggcacgaaaacgtcatccattttgctttattcaaacatcactttggcttgtacccaacgccaagtgcaattgagacttttcatgatcaattaatcacctataaaacaagcaaaggggccatccagtttccgctggatcagcccctaccacttgaattgattactgctattaccgaattccgtcgtcacgaaatcatagcgaaatacgacctttaggattaccgctgccaccaagactgtttaagaaaatcaatggcggttacgtcactcaacgcaatcggcttaacgactcccgcttgttgattcaaaaaaagctgctggtcgtccacagccgcaattaagccactcggctgatgaccatcacttaaagttaaccgaaccacgcagtttaactcataagcttgcaataacgacgcttcaattggtttcagctgttccattagatcacctcatcgaaatagtagctccatcatagcacatttttagaacgtacgttcgataaaaactattacattttgatgacgttgataaaccggtcacttgtaccaatcagtaatttcaccagctaactaattatgccgttaactaccgaggttaccgaacattcgcccaaattattttaaaattgcccggattcggtcagttgaagttagcgcacggctatggctcagttcaaaacatgaccgtcattaaattcaaaagccgccagcttagaataagtctcgtatttgagactgggcgggttcgggctcaaatcgatgtcggtttacgttccagcaattgtcgctccgccccggaggtcggaaatagggcgattattgctgaagaacaggagtctacctaacgagcctaagagtgagctatttttgaccttaataaacaggacgcgctaataaaaaggccactccccggcatattgggggagtggcctttaatgcaatttactttagaatcgcggtaatagcttttacttcatcatcactaaaggttaaattgtgcgttgcttcaagattagcgtgcaagtggtcgacattggtcgtaccaatgatgacgctcgtgacgacctgtgaccgtagtagccaagccaaagccatttgggccaaggtttgtccccgttgctcagcgattctgttcagggcattcaactgattgacaacggctgcagtcccctgatcaaataaatatttattcgttcgatgaatcggaaaatcggctggaattccttgtaagtagcgctgcgtcaataatccttcagctaatggaccatatgccaccaagcccgcattatgctggccgagatagtcaatcaggcccgttgtttgagcctgttgattcaacatgttatatgagtactgattaaccgtaaacggcgtgtgcatctcattaaaatacttaaccatcgttgccgtttggtcgcggtcataatttgaaattccgacatacaacgccttcccctgacgaaccaactggtcaagggccgcggcagtttcatacaaatcgatgttagggtctggacgatgtgagtagaaaatgtcgacgtaatctaaatgcatttgcttaagactacgatccaatgaactgatcaatgttttgcgtgagccgaaagccccatacggccctgaccaggccggatatccggctttagtcgtgatgacgagctcatcacgatacggctttaaatctcgttgcataatttgtccgaacgtccgctctgccgatcccttcgatggtccataattatttgctaaatcaaagctaaaaacgccatgatcaaaggcatctagaaccacttttcgtgaattggcaaacggcgcttcatccccaaaatttcgccatagccctaacgagacaacgggtaactgtagccccgtcttacccacgcgtcgaatcggtaattcgtcatagcgcgttgatgctgctgaatatgtcatcattactcacctcatctaatttttgaatactatttatattataccgcgcctgtaatattggtactgatcaaacgcttaagcggatacaaaagggcgatcctcgccaaatgctaggaccacctcacttaggagtttatatgtgatgtctgctgttgctgcctaattagactttgatttgaaataaggttcaacagtgcgtggctatttcaaaccaccatctattgtagcccggaatcgcccgttcgttaagtcattgcgcgtcagaattgaggtaggcggttataatatgctaaatattggcgaccatggacagcatccaccattactttagtgacgctcgtattagctggctccggtaagctcatcggatcggtcggctttagtatcgctaaggccatggctttgacggtaaaaccatgggtcacgacaatgatctgctcgtctggatgggcttgtgctgttgtcttcaaaaatgctgctacccgttgttgcacgtgcacaaaagtctcgccatccgtcgcaacctccacgtagcttggcaaaacgtcctgtaaaagtggatcaaagtactgcggataggccgctagcaactgatcattatcctgtccatcccactggccgtatgaaatttccaataaccgctcgtcctggctaacaggtagttgccggccttgattcaaaatcgccgccgtggcctgggtccggtcaagcgggctacaaatcaaccgatccgcgaagctaatgtcaaacgtatcgtgcaacgtttgcgcttgctgcttgccaaccgaattcaaatgcgtgacggctgtattaatcgtgccttgttttaaattttgggcgttggccactgtttgtccatgtcgtaccacgtaaaaggttgtcatcgtgcgcctccaagattaaattattattaataatactaattgtgccacagtcttttctcattatctagcttgacaaatagttacgtgcttgctaaattaataccaacgcaattaactgactggtgccaacaccagtttaacgaaggagtgtccaactgatggttctaactaatcctatcaatcatcatatcagttcctcctggtctacacacccatctgtgtcggcctaattttgcgtacgcaaatcagcctgagcacggatgctaagacattcgctaccaggtggaattgcttaatctcgttattatccgtcctggtagtcgaaaccgactgcgaggacttttttattaccttgattaaactactgaaagcgagggtttttcatgccaatttataatttttctgctgggccagccgttctaccacaaccagtcatcactcaaattcaagcggagctaccatcatttcgagactccggcatgagcattttagagatctcgcatcgctccgatttatttgcgcaagtccttcaagatgccgaacaagatcttcgcgatttaatggccattcctgacaactatcacgtgctcttctttcaaggcgggggcacgctacagttcactgctgcgccactaaatctggcgcctcatcatcgtatcgggttgcttgacagcggtcactgggcacaacgcgccgccgatgaagctaaacgggtcggtactaaagtcacgatactggggagtagcgctgccaaccattttaaccaactgccaacggtcgtccagcccatcgatcaatccctcgattatattcatcttacaactaataatactattgaaggaaccatgatgacgcgcctgccagttacgggtcaagtaccactggtagccgacatgtcatcaaactttttaggtgaaccttaccaagtcagcgattttgggctcatctttgctggtgctcagaagaatctgggtcccgctggtttgacaatcgtcattgtccgtgatgatttaattggtcaagtcgccaacctgccaagcatgctggattaccagctattcgcggctaaagattcgatgttcaacacgccgcctgtttttgctatttacgccgcgggtctcgtactcaagtggctaaaggcccaaggcgggctcagcacaatgactgctcgcaatcacgctaaagccgccttactctatgatttcttagaccagtcacaactatttactaatccagtcaagaccagcgaccgttcgaccatgaacgttccattcgtcacaggtcaggccgacctcgataccgcagtcattcaaggcgcccgtgagcacgggttattaaacctaaagggtcaccgcttagttggcggtatgcgtgccagcctctataacgccatgccgttagccggtgttcaggcattagttgactatctagccgcttttgaagcacaccatcgttaatcaaggaggatatttatgtatcaagttaaaacctataacgccatcgccccagccggcctcaacacgtttactgctgattacacgctcaatcaatctgagcatccggatgcttacttaattcgctcggtcaacctacataccgagacattaccgtcatcgttgaaagtcattgtgcgcgctggtgccggcgttaacaacattcctatcgatcaggcaaccgccaacgggactgcagttttcaacaccccgggaagtaacgctaatgccgttaaggaactcatcatcggcctgctcattatggcatcccgtaatctaatagttgcaacgacctattcggcccagcataccgaagctgatatttctcaacgcacagaacacgacaagacgcaatttaatggtattgaattaacgggtaagaccttggccgtcatcggactcggccatgttggcgctctcgttgccaatgcagcattgagtctaggcatgaatgtaattggttacgacccctatctatctgcagatgccgcttggaacattgccaaacaagtccagcgagcggccacgctgccagatgcagtcaaacaagctgattttgtcaccgtccacgttcctaaaaatgccgacacacttcatctgattaataaagatgcgttagccgccatgccaacaggcgttcaattatttaattattcacggctgggcatcgttgacaatactgccgtcatgaatgcgttagccatgggacaagttgcccactactacaccgattttggcgaaccccagcttgccaaccaatccgcggttaccgtgacaccccatatcggcggctcgactatcgaggctgaaatcaacggtgccacacaagctgcgcgcactatcatgacttatttggaaaccggtaacgttcatgcggccatcaatctgccagacttaaacgtcccgttcaacgcggcttaccgctttacagtcattcacgaaaatgtgcctaatatggtgagtcaaatcacggccaaactagcagcggccaacctcaacatcactaccatggctaacgccgctaagcaccagattgcttacaccatcattgacgtcgacgacctacagcagccacaacaagccgacctaatagctgaactgtctaaaattccggcagtgagtcgcgttcgactattaaaacggggtagcgtcgaatgaagattgaacacttacaacacccgacaactcaccaactcgatcagttaatgacaatctggttaagtggtaatttaacggcccatgactttgtcagtgccgactactggcgtcaacaagcccccttagtacgtgaagcattacaatcagccgaactcatcatcggactgaccgacggacctgaagcttatattctgggctttataggcttacaaaacgattacattgccggaattttcatttgcaatgatgctcaacatcaaggtctggggacggcgctattggcgactgcccaagctgaccatcatcaattacaattaaacgtctatgttgctaatcgcccagccattgccttttatcactatcacggtttccgtgtcattgatcaggctagtgaccaagcaacccagcaaccagaatatacgatgcaatggcaacgttagttttcttaattaagccagtacgattcttaacgagtcgtactggctttatttgcttaataatattaatgattaaaaaaataatattgtatttaatctaattttaatgtattctcatctacatatcataatcatttgaagcagggggtacatatatgcaatggaaattatttgccacagttgccacgttaacggcaacgaccggcgttttactcgtcggctgtggtcagtcctcatccagttcaagcaatgccggcaacacaacggccaaaatggccaagactcaagtcctcaattggtcggaaaacggccaggatttgaccacccttgacccgtccttagccactgatgttatcagtgggacgatgatcagtaattcgcaagaaggtttgtatcgattaggtaaaaacagtaaggtcacaccaggtattgccactaaaacgaccgtgtccaaagataaaaagacttatacttttaccctgcgtaagaatgccaaatggagtaatggcgatcaagtgaccgcacaagactttgtgtatggctggcgtcgtacagttaatccgaagacggcttcccaatacgcctacttatattccggtatcaaaaatgctgacaaaatcgtcagcggcaaggccaagactagtaccttgggcatcaaggccgatggtaagtataagctgaccgtcaaacttgaaaagcccatgcagtatttcaaattattgatgggtttcgtggtcttcttcccgcaaaaccagcacgcggtggaaaaatacggaaaggactacgggaccagttccagcaagatggtttacaacgggccattcaagatgactggttggaaagggaccaactcgacctggacacttaagcgcaatcctaattactgggataaaaaacacgtttacttaactaagatcaaagaccaagtcgtgaagttgacgacgacagcctttaacctcttccagagtaataagctcgacatggcaacgttatctggacaacaagtcaagaacgaaaagaataataacaaactggtcatccgtaagtcttcacgtctaaattacttggaattcaatcaaaagaaggtgaagttactcgccaataagaagattcgtcaagcaatgtcactgactttgaatcgtaagcagttggtcaacgatgtcctcggcgatggttccgtcactccaaagggctttgttacgaccggacttgctactgatccaacgactggtaaggacttcgccaccgaaaatacggttaaatcagctgttactcaggacaccaccaaagctaaaaagctctggaaacaaggactaaaagaaaccggcaagaagtcggttaccttaacgttaactcatgacgatacagatcagatgaaggccctcgctgaatacgttcagggacaattagaaaaggaattaccgggacttaaagtgcaaagtgtcaccgttccttataagacaagaatttcccgagaaattgcgggtaatttccagctggttatctccgcatggcaagctgactttgctgatccagtttcagacctcggtatcatgacatcaactaacgattacaactttggtaagtggaccaacaagactttcgatagtgctatcaacacagcaaatagtacaaccagtacaacgaagcgttggcaagctctcgcaaccgctgaaaagacgatggcgacggatcaaggggtcgcaccgctctcacaaaacgtcatcgcacaaatggtcaaccctaagctgaaaggcctagtctacaacacggcgggcattaactataacttcaagagtgcctatatggccaaataaggtgacctaactagcatcgcctcacgtcaaactacccttaaatcgcacaataaaaggtatcgtagcaacaaactacggtactttttttgtgtttcttgacacattttgcggctgttaattactttaattattagaatcaaagcattgattttaatctttctttaatgtattctcgtgaccattcaagttggggggaagttttactatgaaatggaaagtaatgttgacaactgctactgcggccgcatcgaccggccttttgttagctgcctgtagtcaaggtcagtccaagtcagataatgcggggaacttacgcgcgggaatggcacaaaagcaagtcttgaactggtcagaaaatggctccgaactaacgactttggatacttcgctagtcaccgattcgatcagtgccaatatgatcaataacacgatggagggcctctaccgtattggcaataataataaaatcacaccgggcattgcgacccatactgtcatttccaaagataaaaaaacttatacgttcacattgcgcaaagacgccaagtggagcaacggcgatcccgtaaccgctcaagatttcgtttatagttggcggcgaaccatcgatcccaagaccgcttcgcaatatgcttatctttattctggtatcaagaatgccgaccaaatcaccaatggtaaagctaaagccaatagtttaggaattaaagctgacggtaaatacaagctaaccgtgacacttgataaacccatggcttattttaaactcctaatgggctttgccatcttcttcccgcagaaccaacacgccgtacagaaatacggcaaggactatgggacaacggccaccaagatggtctacgatgggccgtttaccatgaagggctggaaaggcactaatacgacatggtccctgaaccgcaatcctaaatattgggataaaaaacacgtttacttagaaaagatcaatgaccaagtcgttaagtcaaccacgaccggattcaacttattccagagcaacaaactcgacatggccaccctgagcggcgaacaagtcaaaaacgaaaagaataatcccaagttagtgctccgtaagacatcccgtctgaactacctcgagtttaatcagaaaaaggtgcccgcgctagctaatgccaagctccggcaagcgatgtccttaactattgaccggcaccaacttgtcacggacgtactagcggatggctcagcagttccaaagggctttgtcaccaccgggctcgcaaccgatccaacgactggtgaagatttcgctactgaaaatgcagttagtgcggcgacaactcaagacaccgctaaggccaagaaactgtgggcagaaggattaaaagaaaccggcaaaaagtcattaaccttaacgcttacgcacgataatattgaccaaaccaaagagacggccgaatatgttcagggacagctagaaaaggaactacccggtttgaagattaccgatattaccttgccattcaaaaaccgacttgcacgtgaaatatcgggtgatttccaactcgctatttctggctggcaagctgacttcgccgaccccatctctgacctaggcattctcacttccacgaatgattacaactttggtaagtggaaaaatgctgattatgacgctgctgtcaagcaggccgagcaagcaactgatccgacagtacgctggactgctctaggcaaagctgaaaaaattattgggacggatgaaggcgttgcaccattaactcaaacaacgctggcacagatggtcaaccctaagttaaagggcctgatttataacacttctggtaccaactataacttcaaagacgcctatatggcaaaataaaccatcagataactcacagacgctcactagcaaagactagcgagcgttttttatatagtcaagatatatttttagaatatgcaagattatgtttaaatattgacaaaattatataaaaagtttttaattagggtaaatgaaagctgtttcaattatgacttaaatatgtaaaggaagcgttgatggtatgaacattgagcttttcatcgcccgccgcaaagccctaggactttcacaaaaagccctagcagatggtatttgtactcaggcgacactaagtaagttcgagaacaatggcaaagcacctgccatacgaatcgttgcccaactttgtcagcgactcaacctacaattggaagatgtctttccaaccgaacgcgtcgctgatgccgctgttttgaagattttggaacaggtcgagttcgacctcattacaactgaatatcaagatgccgaagtacaacttgaaaaggctgcggatatgccgcgacatgaccgcgaaaccaaattacaatattgttatctaaaaggctatgttgctgcccttaaccaccacccgatcagtgatgtcatctttaattttgaccaaatcatcaccgatttggacgaggctcacatcacaatctatacacagctggcctactgtggtatcgggattgcttatcagcagaaccaggataacgataaagcccagtactattttgaaaaagtacgccacgccctaccgaacctaccgctagaaacgaccgctagtgtttggcgcgtgattaacttagcttattacacgggggctttttacgctaacattaatgatacaccgcggagtttgcagttattaaactacgggattgagatttgtgcgcgattccacgttacctattacgcagcgcggatcaaattcttacaggcccaattatccgatgaaccggatcaaattcatgaatatttaaatgatgcggccgcccttgccagaatgaacaataaccggcaattacttaagaatatttcaagttattcagattctcactaatttacggttaaataattgatttttgttaataagtcgcctaaactgcaagtattaaaagacgagtttttacaactattgaggaggtcttgcccatgttattagcaggtttattggccgcagccggactagctgccgttgccggcgtcgtggctggcgcccgtgttcccgctgcccaaccagtcagaattaagcatgaccaacgcacatctcaaaatcgtcgataatgtggcgacacttatctatgatataaataaaggctactggaagcgaaattccagtagcctttttgtttaattaaatcgccgttgacgactaacaactgttagccctagcaagaaccagcccaaaatcattagccaatccattgattgttcactagtctgtggcaattgttgcgccgacttgcgattagttgcttttgtaactttaacaactggtttagaagttgctactaattttattggctgtcctaacaatttcgttggccgagtcgtggttactaaattagtttgcttgactaacttagctgtctcagtcttcgttgtgacaacctgatctgaatcactatcctcgtcagcgtgtcctggtagcaccggttcactcggttcactcggctcacttggttcactcggttcacttggttcgcccggttcgcttggttcactcggttcgcttggttcactcggtttgcttggttcactcggctcacttggttcactcggttcactcggttcactcggttcactcggttcactcggttcactcggttcactcggttcactcggttcactcggttcactcggttcgcttggttcgctcggttcacttggttcgacctcatcggcaaaaactaattggccttgataagcgctttgctcattcaacacaagcacttgcgcctgtgtattgatcaagtaaccgtccggtgcttgaatttcgctaaccgtataagcaccttgcgttagacctgtaagctgtgcttgaccagtcgcatccgttgtcaactgagcaaccagcgttccggcagcatttttcacggcaaaaaccgccccggccaagcgattggcgccactcgaatccgtcttaaccaccgtcaatttcccggtttgatacgtattcgttaatgtcaccgtctcaccactagttgtttgactactgatatagcgccagcaatggccgtttcaatcaccgtataagtgtacgcattgccataaacatccgtcacatccaaatcactgaaagtgcccgtatagccatttgctgacgttaattgcaaggtctgataagcttgaccattgcgttgcaacgtcacttcaacggtcggcgtttgcactccagctggcacgtcagcccaaactttgttaacagtcagcgccgtcttagccattcgtttgtcaaccacactacctgtgaccacgttagccgttgcttgcactgcggataccgtgaagacgtgcttggccgtgtcgatctggtagccactcggagccgccgtctcaactagcatgtacgtcccagccgacaagttaccgatgcgtaactgtccaactgaatcagtcaccaaatcggtccgaagtaccgtacccgtactatcctctaactgataagtggcaccagcaactgactggccgtcaccatcagttttattaatgaccaaactgtaactctgaatgtcatcactagcagttccggaaccaccaaatctaacggccacgttcgattgttcactttttggttcgcctgtcgaactgccctcatttggatcagtcgcatctccaatgacaggtgcatacgttacacccgcattattggtgtacgtatgtcctactgtcagaccaacttcataaaatatattgaccgctacatctaattggtcaatattaattgtcatctgctgacccacaaccgtcacggttacttgtggtgttgataccccatcagcgtaggtaaactgctgcgttgcaaaatcataagtgcccagtgccgcgtctttaacaaaggcaccgtcagtataatgaccagtttccatcgtcatggtaccttcgtgcgtttgataaaggcctagctgatcaacaatcgcaacttgctgccacttttcactattaatgtttgcgacaacttgccagatcattttggtgggattaccatcagcatctaaactattactatcggcccagccaaccttattaatccagtcgtactactgccagtggttgcgctagtcccagtaacataaaacgttaagtctccttgacgattataacgatcactagtcgcataataatcattaaaagttagtgttccggtttgactaccggtctcggccgtaaaagtcccgacgaccgttccatctgatttttggacatcaatatgctgcgtaccattggtaaagacaacattctctggtaaggtcaccgttgctgtactgccagcagttacgctaacatcatcggctattgaccaatgatacttcgcgatatagttcgcatacagactcaatacatccgtagcgctatacgtaacaccatcatcgtcagtcaccgttgcgtcagtagcatcgagcccctgaaccgcaaccgttgcccgttgtgctaaactgcgaagactggcccggctcattctggacagtgtcgcgacagacgcagttgcttgatccgtcgtagttgccgttctcgccgagtctttttgactggtaacgacaccactgtacatattagtcgtttgttgctgattctgggtcgttgcttgctcgttgttcgccttcgcactagccgctcgttgatccgctttggcattagccgtcgcccgggacgtcgctgtcgtatcagtactgtccgttgttgcttgagcggctgtcacacctgaagtcgtttggctagtagccgttgtgctagatgattgggttgatgactcagacgcggtgaccgctttgctagtcgccgtttcggtcgcagcaccagttgccgatgctttcgtgctactgctactgctactgctactgctactgctactgctactgctactgctactgctcgtagtttgtcgcaacaccacttgattagcaagtgtactcgagccagaagtctgcgtcgtttcagtggcagtggtagccgtgtccgccgcactcactgtttgatttgtcacaatcaatgtcaacatggcggccgttcccattatccaagttttgaaatcgattaatcgcatgatatccccccctttcttatataagttaaaacttttaaaccgattacacgccttaattataaaccacattccgcaaatttgaagacactttttgtcaaaattcgtcgctcacagatagcagttacataccagcaatatttgttcaaaaggctcattacgtctatataatttttatttatgtacacttaattaatttaccgatatatcaacattttaaagacattaatcataattagtattataatattttatacaaaagttgtatgccatcaattttgacgagttcgtgacagttgttagctaattaaaataatttatgctgattaatatagatttaactaattgcaatcagtaaaaatgatgtcattcgtttcatttataatttaaacccattaactgctttagttgcttgtcaactaattacgtcgaaaaacggggcagactggcgctaccgatggcacgtagaccaattattgatttatcgagcgatatataacagcaccttaactgataagtattttttatagctttattactaatagtttgccattaacttgtatgcttcttaatctgcataatgtttacttatcgctttaacactttaacctttatttctaacgactcccacttaagcaatgcaactttttttccggtgattaatcagactaaccgacacgtcatgataatcaaaacgatgcggcagccctttaactgataaaattatataatgactcaaaacttaatttaccagcaacactacatctgtaccaatcagcactaacattcttattaataatcattatagtttaagcacgttaactattttgtaaattaattttcactaattatcctgacactattcgttataacaatggtatgattaacatgacgtataataaccagctttaatcaatcagtcggagcctgcttacctgcgactattaattgcgcaaccaacattaatattttatggaggctacatttttcatgaacattaaagacttgtattacttccaacgcttaatcagcactcagagttatacgcaaacggctgctgattttcacgttagccaacccacaatctcccaagcaattaaacgactagaacgtcatttccaagtgacactgttctttcgccaagcaaagaccaaggcgctggtgttaacacctagtggccagcaactattgctcgcagccaacgacattatcaacaactggcagcatgtcaatgaatcaatcagtcatttgcgtcaacatacactgcggtttggtatcgaaccatccgtcagtgaacattatttaccggcattaacaaaaccaatcatcgagcaagatttgcttagtagcgtccacactgttgaaatgggggctaatcaacttgtcaaacaggttttagccggccaactcgacttagccatcagtggtaacttggatcaaacattggatgaacggcttgcagtaacgccattacggccctttaaatttcgcattctcgctaatgctgcacaccccttagcaaaggctgagcatccgacttttgcagaagcgctaaaatcgccttttgtactgcttaatgcaacttacttaaataaactagtcttccggcaacttgctgaacaactttcgattgaaccccaagttctcttcgaatctgatagcagcaccttgatcaagggattagttaaagagaacctggcactaggcttcatttccgacatcacgacccccaacgatggtctcgttgagattccgttcgacgacgttcaggttcctagcgtgcatatcaacttgattcgtcgggcccaccaatttccaattggcttagtcaaacaggttatcgacattattgaaaaaacatttgcggctgacaatgccgaacaaaaatcttaaccacaaacttgatcataatcacacatgcgctccaataaaaatacccaacttatctagaatgataggttgggcgttcttattggggcgcatttttggttaagtcatcacgattaaatttacacgaccaactcgtgctcgtaatcacacaaccgccgttaaaaatcacattcacgactccagcagcgaagctaattgtgacctaaaactggtaaacttttgcttcgtacgctcgtaatacgtcttgatgatcttcatcgtagttactgatcaacagatgcgcatcagcgggtaattctgcaaagtgtcgcgtctgggttgccgcagtaaagttacaaattactagcaggtgctgcgaccccatatgccgcatataggcataaacggccgcatcatcaggtgataataggtgataagttcccgtcgttatgactggtaaatggtgccggagcttaatcaaccgctgataatagctcagaactgaaccgggcgttcgttgcgcgagttgcgcgttgatccgcggataattggtattaaccgctagccacggtgttgccgttgaaaacccagcattctgactatcatcccactgcatcggtgtacgcgcattatcccgcgacatatgggcgagataacctaacatctgttcaggttgaacgacctgttcgtcatcaacaaagtgatgatacgcattcagtgattccaagtcttgatagtcggttaacttggtaaaatgggcattcgtcatgcctagctcctcaccttcgtagatgtagggtgtcccttgaagaaagtgcaatagggtcgctagcattttggctgaacgttcccgataagctggccgttcatccccgaatcgtgacacaattcgcggttggtcatgattattccaatagagactattccaggctgtcccttgtaagcccatttgccacttagacaagctctgctttaggtcaaccagtcggacgggctggtcattccacttacctagcgccggatctggattaccatccaggcccatgtgttcaaattcaaacaccatgtttaattcctgaccttggctgcttgccagttgcttagcatcagcaaccgtagccccaggcgtttcgccgaccgtcatcagttgatggcctgcaaacacttgctgattcatttcttgtaagtattcatggagatgcggaccattggcaataattccgccgattgccgcgtatggttccccagcttctggctgcccatctgcaaagctatcaggcttggaaatcaagttaatgacatccaagcggaaaccgtccacgcccttattgacccagaaattcatcatgtcatagactgcttgccgtagttgcggattatcccagttcaaatctggctgttcaaccgcaaatgaatgtaagtaatactgatcacggctggcaacatatttccaagcagagccaccgaaaaagccaccccagttgtttggttcatgcccatcaacaggatcacgccaaatataatagtccgcgtacggattatccttactttgcgcactcgtcgtaaaccacttattttgatcagatgaatggttgacaacaatgtccatcatgatttttaaccctttcgcatgggccgttgttaataattgatcaaaatcagccatcgtcccgaattctggattaatatcgtaataatcactaatatcatagccattatcgacaccgggtgaacggtaaattgggttgagccaaatcacatccgcgccgagctgtttaatataatctaaccgttgtgtaattcctggcaaatcaccgattccatcaccatttgaatcctgaaacgaccgtggataaacctgataaacaaccgctgattgccaccattgattagccatatatgattatccccctaaaaaagtttgctttaaaaaacttgtcacggtcaaccataaaaggcaccgcttacaacactaaccattctaccattgtcggtcatttgagcgtacccacttatcgctatttatttgttagcctaacacgtttctagccatatcttagttgacgaatcaaaaacgccatgctattatcgcttatattcaaataacgaacgataatcttactttcaagtagcgaattaactgtgcgtcaggaagtcggtgggtgctgcgaaccgatcaggttaatctcgatgaaatacggtaggagaggtccgggtacgcccggcggataacaactagagccgttaactgctagtgagtggagtcatattgtggctcaagctgggtggtaccacggtctaatcaatcgtccctgttgcattattatgcaacagggacgattttttatattcacccactattatcggcgtacaaccgctgttgaagcagtccgtgtcgggctattcactgctggtttaacgacctcaaaggagttaattattatgcctaattcaaagaaatggcgttcagttcagttaccagaagccctactcgttttactcattatgcttgcaattatgggacttggcgctattaagttcggcctgtcaccacagacccccgttattctcgttatcgccctcatcattttatgggcccgaattcgcggtgcccactgggatgacattcacggtggcatcatcgatggtattaaaactgggattatcccaatttttatttttctactcatcggggcactcatcagcgtttggattgcagctggcatcattccttcaatgatggtctttgggtttcatctgatctctgcgcagtggttcgttccatccgtttttctcgtttgtgcaattattggaacttccatcgggagtgccttcacgattatctcaacgattgggattgccctctttggaatcgggacaacgatgggcatcaacccagctttgattgccggagctatcatctcaggagccatttttggagataagacttcaccgttgtcagattcgaccaacctggccgcagccattgccgaagcagatttattcgaccacattcgtaatctgatgtggtctacgattcctgcttttgtcgtatcactagtactctacgccgttttaggtgccggagccgcaacacaaagccatttgggcaagattcaaacgacgttgaccgtcctcaataataactttaccatcagctggtgggcggccttgccactcgtcgtcatgtttgcctgtgccctacttaaaattccagccattgcaaccttgttgatgaatatcggtcttgccatcgtcatgatttttatcgagcaacctcatattgccttaactaagatcgccacgatgatcgaaaccggctttgtagccaaaactggcaacgccggggtggacgccttactctcacgtggcggtatcagtgccatgatgagcacggtctccttaatcctattaaccctgtcgttaggcggtttactaatgaaattcaacctcattcagacagcaatggtgccgctaactaagcgattgaaaggtgccggggcaactgttacggctgcgattttagcgggaatcggtgtcaacatctttgtcggtgaacagtacctttccgttatcttgcctggtaaagcgttcaaaacgaccttcaatcagcgaggattggctaacttagccctcagtcgagtccttgaagacggtggaactgtcatcaattacctgattccgtggggcgttgccggggcctttgccgctaacacgctcggggtatcaaccttagcttacctgccattttgtttcttcagcttactatcaccggtattctcaattatcagtggtttcactggctggggcctgaagcatcagccagccaacgaagccggttaatttaaaactaggttgtttaatttaatcggtgaccgaaccaatcccggaatataattgttactgcttgtgattcgcccccactgctggctacaattagacaagagcatgttttggatcaatctaacaattcgtcaattgatactgcatgatttatttactaataagtcacatcccggcaccacgtcaactaacgaacttagatatgaggagggggattacaatgcttgcatacgggtatcaaaaatttgggggacctaccgtatttgaagaactaccacaatcacagctgattccaacagataatcaattattaatcaaaactttagccgttaacctaaccgagggagaccgcttagaacggctaggtactatccaaagcgtcgcactaccgcatattcctgggcatgatgtcattgggaaaatcattcaagttggcgccgctgtcactgacttggacgttgggacagtggtggctgcccgcacgaaccatacttacgcggaccaggtttgtttagatagtgatctagcggtgaccatgccaactaatcttgatccggtcaccgccgtcagcttagtcactccagggattgtcgcttacaaaacggtgcgctactttgcggacatccaggccgaccaaacggtgattgtcaaaggcgctggcagcccagtcggcttgttaattattcagttagccaaacgattaggtgcccacgttatcgcgattgctagtgaccgttatgctaaattgattgcgacactgggagtcgaccaattcgtcgactatcagcatcaaaatccagttcacgtgttagccgaccgcggtgacgtcgtaatcaatgtcgctatcgatggcgttggtggcaaagatgacttagcaatggccaaatttgatgcgaccatcgcttcatttgcccgtcacttgccagccaccagtaaatcaattcgtttccaagcaatccaaccgaccgaagtgatttctgatcaggccgccttacaattgctattcaagttgctagatactggtcaattgaccacgacgatcaatgaacaactaccgtttaacctcacgggcttcattcaaggtcaccaacgactagatgagcctcacgtgggtcaagtggtcgtcgcgcgctaaaaaaactgctttcaaaaggataacttttgaaagcagttttttagtcaggtggtcgcttattaagaccatcgcagaattttgagcaacccaattcacactaatcgtaacgattgggtatatttcaaagactgcctcaattagccaagtcccggatacctatgcgagtcggtagacccaagcctcataaggccgtaatttatttggctgctgctcgccataattactaatcaagcatttggccgtgggcgtcagatattgatccagtggtcgggacagtgtctcggctgtgaaattgcaacaaactagccaggtccgcccttcccattgccgttcatataagaatacctgcggatcatcggcccacaagagctcaaacgaacctaacgtcactaaggggtattgatgtcgtaattgaatcaagtgctggtaatagtaccacactgaatccagatcagccaaagctgcggcagcattgatttgacgatagttgggatttgaccgtgagccatggcgccgcgtcactaaaacccgcgttaacctccgtgtcccattgcatcggcgttcgcgagttgtcccgagaacgcgccgctaatcgggccatcatatctgccggtgatagtagttggcgctcagtcactaaatcacgataggcattgagcgattcaatatctcggtaactggttaattcagtaaaatgagcgtcagtcatccccagttcttcaccttgataaatatacggggttccctgcaagaggtgtaaacacgttgcgagcatttcagccgaacgtacccgatatgctggtcggtcatcaccaaaacgtgagaccgctcgtggcgtatcatgattgttccaaaacaggctgttccaagcccgcccttcaagtccgacttgccagtcactaatgactttctttagcgccactaacggtgtcttacgcgtactccacttaccaagaccatgctgactattatcaagtcgcagatgttgaaattcaaagaccatatctaattcgtgccgatcagcgcccgcatacttcagcgcatccgctggtgtcaccccgtgggtctcaccaaccgtcatgatatcaaactgtgacaacacttcttggttcatttcttgcaagaattcatgaactcgcggtccgttcgttactcgagcatcgccaaactgactgtgcggtttcagtggaccatttggtaacccgggtaacttagagatttggttaatgacgtccattcgaaaaccgtcaacacccttgttcagccaccaggtcatcatcgtataaactgactctcgtaaggtcggattctcccagtttaaatcaggttgttttgttgaaaacgtgtgtaaataatactgctgggtctgctcatcatattgccatgctgaaccaccaaaagccgcatcccaattattgggcgcctttttgccgttacctgagcgccaaaagtagaaatcacgatattgattggtgcggtcctggcgactgcgtttgaaccatggatgctcatcagaggtatggttaacaaccaagtccatgatgatctttaagccccggtcatgggcggcttgcaataattcatcaaaatcagccatagtgccaaagtcggccgcaatttgttgataatcactaatatcataaccattatcatcgttgggtgaacgataaatgggattgagccaaatgacgtcgattcctaattgctttaagtagtctaggtgggccgtgatcccctttaagtcaccaataccatcatgattggtatcttgaaaactccgtggatagacctgatagacaacggcttgttgccaccacttgattgttgctgccataattacgattaactccttagttacgcggtaaggcccttgatgagcttaactggtaacgtatattttgattccagtgtacaattcgcatcctcaatccgctgcaatagtagagaaaccagtaacgtgctaatatccgctaacggttgttctactgttgttaattcagaatgataatcacgtatgagcgccgtgccatcataaccaacaacgcgtaattgctcaggaaccgttaatgacagttgtcgcgcgacgttgagcactagtaaagcggtcaaatcatcactacaaaaaataccatcatactgatgttgtgtcataatcgtcttaatttccatcatcttcagcgcgggggtcaattcaaacggtaattcgtggacatggggtgttagctgttgggcagtcaagtaggcttcatatccttcacggcgaccattcgttggcgaaccagcgtgtgacttaccagtaaaaatagccacgttagtcgcccccgcctgatgcaatgtctgggttgctagccagcccccctggtaattatccgaactaacgatgggaatattgtcggataagtaccggtcaaatgaaataatcggaaggccgtattgttgatattcttcaatacctaaattgtgggcaccagcaataatcccatcgacctgattagccatcaacatttgtaagtagtcgcgttctttttgcggatcatccgcactattacataaaatcaccttataatttttagcaaataagattttttcaatccgggacaccagttcaccaaagaacggattactaatatctgaaaagatgacgccaattaagcgcgtattctttccttgcagtgagcgtgccatattattcggctgataatgcagttctcgcatcgccgcgaaaactttttctttagtctgactactcaggtagccatggttattaataacccgagaaacggttgtcgctgagacccccgctagcttcgcaacatcatttaattttggtttcattgttatcgactccagtatgctctgattggcgccattcccagactttaccggtgactgccgtagtgtcaccttgaacgttaaggcgactcggggtagcgtttaagaagaaacggccggtcattacggaatagccattatcaatatagcattcaaagactgacacatctatgattagccggatttttatcgtcttatgggccgttaactcaacttgacgagtctgaccataatcttcagcaaacgaattccccgtatgccgccgatcaatcataacctggccatggttggcatcaacagtcacctgcagctggccactttcctgctgatcagcaatgttaaccgtgaccgttttatcagcgggaaccgtcagtaagagttcaaagctgccattcaaagcggccaccgtcgcccgttgttgctcaaagactaggtcatgcgccgtcatccgcaaatcatccaccgctgccactggattttgatagaggtgcccatctttaagcgttagttccttaactaagctcaaacaatgggcccaattttcacgatcagttggataggcaatttcaggtaacccaatccagctgacggctaacgcgcggccatccggcgcattgattgcctgcgtggcatacacgtcaaagccatcatctaattgcgtcagggcgtggggttcagtgaattgtgcctgagccagatccaattgatcggcaactaggtacatgttcggataaatattctgatacggggtcgttgtttgtgataacccttggggacagaacaataagacgggctgttgatcgatccagaccagatttggacactcaatcatataaccccgcgcatttgcgggaacgttcaactcgccttgacacgtccaggtggtcagatcctttgagaaataaaccaagatagcaccgatctcagtagtcgtctgcgcaccgatcagcgcgtagtagccgtggtcagtccggatcaagtccggatcacgaaacgaactcgtgtacccagccggagcatgcgcaattagtggccgggacagctttttaatgtgattatccgtgtccatccaggcacctaattgatacgattcacgttgccagtcggcagtacggacattacccgtatacataataaataactgatcatcaattggtagtgctgtacccgtgtacgcgccgtgtgagtcgtacggcgtatctggtcgaatcgctaagccctcatcatgccaatccaccaagttcttagaggtcacgtgttgccatgacttcagtccgtgtaccggaccgaacggaaagacttggtagaacaggtgccactgaccatcaaagtatgaaaagccattggggtcatttaacaaacctgatgtaggctgaatatgatgttgcatccgccacttagactggcgtgcctgggcaacgagctgtggtagcttagttgctggccactgttcataaggggtataacgggttttacgattccatatcatgacgatgagctcctttttaacgttcgacttaattgtcactattataaaaccgcttacaccgatatgtcaatcgtttgacatttttatattatattttcatgtcagcgtttcaaattcggctttttaacaagattatcaagcaattaaattttgtatcaaacgcttgacatattttccaaacttgttattattgggtctgtaaagcgcttgcattattaaattaaaaataattttagactcagggagtgaattattatgaatcatcaagaagttgccgaccgcgtacttaatgcaattggtaaaaacaacattcaagccgccgcccactgtgcgacacgccttcgtttggtcatcaaggatgaatccaagattgatcaacaagccttagatgacgacgcggacgttaaggggaccttcgaaactaacggccaatatcaaatcattattggccctggcgatgtcgataaagtctatgacgccttaatcgccaaaacaggtcttaaagaagcgacccccgatgacatcaaggcagttgccgctgcgggtcaaaagaaaaatccattaatggacttcctcaaagtcttatctgatatttttattccaatcgtccctgcactagttgctgggggtctattaatggcactaaacaacgttttgactgccgagcatctttttatggcgaagtcagttgttgaagtttaccccggtctcaaaggtatcgccgaaatgattaacgcgatggctagtgccccgttcactttcttgccaattctcttaggattttcagcaacgaagcgcttcggcggcaacccctatctgggtgctacgatgggcatgatcatggtcttaccatcacttgttaacggctatagcgttgcaacgaccatggccgccggcaagatggtttactggaacgtctttggtttacacgttgcacaagcaggctatcaaggccaagtgctccctgttttggccgttgcttatattttggctactctggagaagttcttccacaaacatatcaagggtgcatttgactttacgttcacgccaatgtttgcaattgtcatcactggcttcctaactttcacaatcgtcggtcctgtcttacgaacggtgagcgacgcattaactaacggtttagtaggcttatataacacgactggttggattggcatgggcatctttggccttctctactcggccattgtcattactgggctccaccaaaccttcccggctattgaaacccagttattggctaacgtcgccaaaacgggaggttcttttatcttcccagtcgcctcgatggccaacattgggcaaggtgccgccactttagctattttctttgccactaagagccaaaagcaaaaagccctgacttcttcagccggggtctcagcgttactcggaattacggaacctgctatttttggggtcaacctcaagatgaaatttccatttgtctttgcagcgattgcctcaggaattgcttcagctttcttaggactattccacgttctgtctgtggcgatgggtcccgcatcagtcatcgggttcatttcgattgcttcaaagtcgattccagcattcatgctcagtgctgtcatctcgttcgtcgtcgcatttattccaacttttatctatgccaaacgaacactcggtgacgatcgtgatcaagtaaaatcaccagcaccaacgagtaccgtcatcaatgttaatgatgagattatcagtgcaccagtaacggggactagcgaaagtctcaaacaagttaacgaccaagttttctcagccgaaatcatgggtaaaggcgccgcaatcgtgccaagcgctgatcaggtcgtcgcaccagctgacggggtcatcactgtcacttatgatagccatcatgcttatggcatcaaaacaactgctggtgccgaaattctgattcacttaggattagatacggtcaatttaaatggtgaacacttcactactaacgttcagaagggcgataccgttcatcaaggtgatctactcggaacgtttgacgtcgctgccttaaaagccgctaactatgatccaaccgtcatgctagtcgtcacaaatacggccaattacgctaatgttgaacgactcaaagtcacgaatgtccaagctagtgaacagctcgttgcgctgactgaaccggcagctagctcagttgctgctacaactgtctaaactttattaggaggacgtcatgcctgttgaatatgaccccaaaaccggcttaatcaatcttcataatgaccaaattagctatgttattcaaattttagcccatcgttacccagtgcatcgatattttggacgttacttttcaaaacaaccgtactttgagccgatgccatccggtagccatgcttttgctaatgacccaacagaacgctttccatattccgtgacttcactgccactcgaatattccactattggcagtggtgactatcgccagccagcttacgttattaaggatgctaacaatcaattactgccaattttagaatataccggtttttctgtgaatgatcagccaatcaactcgcgccaattgccacccaccgttagcaaacacacgcctgtaacaaccctagtcattcatttggccgattcagtgaccaagttacagatggatcttaactacactatttttgaaaatcagccgcttatcttgcgaagcacaactctgcgccatcacggcactactaatttgcaagtaacagccctatccagcgctcaactagatctaccaactgaccaatatactgcgctgacattaagcggtacccatgcacatgaagctaatccatcgtttaaccgtttacacccagggttacaaacggttcgcagtctgcgcgacactagtggaccacaacaccaaccgttcatggctctagcagaacctaacacgacagaattagctgggactgttattggttgtgcactagcatggagtggtaacttcgacagtactgtcgaagttgaccaatatcaacatagccgcctaacaatcggtcttgaaccagatacattcgaatggcagctcaaaccaaatagcagttttcagactcctgaagccgtgctaacttggacaaatactggttttaacggcatgtcacaagtatttcacgactttagccatcagctgatgccctcccagactaacattccaagtgtgcttaacacttgggaaacactgacatttgccgtttcagagtctaaagttcaacacttaatcgaacacgcccaccagttaggcttacaaatgcttgtcttagacgacggctggtttgtcaaccgtaacggtgaaaatgggcaattaggtgactggtatgttgaccccattaagtttcctaatggtctgaaaccccttgcccaacaagcccatcatcatcgaatgaaattcggtctctgggtggaaccagaaatgatcaccactaacagccagctttaccaacaacatcctgactgggtattacaatatgttgatcggacacccatcacagctcgccaccagctagtcttagatctttcgcaggctgctgtccgtgaccacttagtcactactctgacgaacttggttcaaaataaccaactcgattattttaaatgggatatgaatcgccatcttacacaggttggcagcacacgcttaccggctgcacaacagggggaactgtattatcgctacgtctgtggaatttatgatattctcacacgcttgaagcgcgcctgccccaagctgattatcgaaaattgttcagctggtggtggccggtttgattttggtatgctaccatacaccaatcagacgtggataagcgatttgactgatccagtcgaccgagcaaccatcgagaacggatttagttatctatttccaccacggatattcagcaaccatataaccgcatcacccaatgcgcaaaatggccgaataacaccatttgaaactcgattacaattagcctgcatcgggcaactaggattggaacttaatcctaaacaacttgctcctagtgaacagcaacttcttcgaggagccttgattaaatatcagcaactgaaatctacttttatcaaggcccacttttatcgtctaccgacaacaagacacgttgttgcgtggttgttagtaacggcagataaaaagcaggcaatttgctgttacttaaatgggcttaattctgctgtcaaaactcagcacccattaccattacactatctcgatgctgaattaacttatagcgattcatcaggtaatagctatacggggcatcagttaaacacgatgggaattccacttaaacccaccaacgctgatttcactagtcagctaatttatttacgtcaaagttaatgtaatcgttaacaaaatttctgattaagagtatactattaataaataggactacatttttaactacaggaggcacactatgcttttaggtgcaattgaagctggtggtacaaaatttgtttgtgccacgggcgctgaaaacgggcaagttagcgaccgaatttcgatccccacgacaacccccgctgaaaccatgactgcggtagacgactattttacgactcatcccgttgacgcgattggtatcggttcatttggccccatcggcgttaatcccgatgatccgaaatatggttacattaccacgactcccaaacccggctggggtgacttcgattttttaggccatcttaaaagtcgcttcaacatcccactctactggaccactgatgttaacgaagccgcttatggcgaatcaatgattggaatcgctaaggacgtccctaacagcatctacatgacgattggtaccggtgttggcgctggcgtcattagtcagaaccacatttttaatggtcgcactcatactgagcttggtcacatgcgactcaaccggttacctggggacgatttcaagtccaactgcccctaccatgacatctgtttagaaggtttagctgctgggccagcagttggaaaacgaacggggaaagctgggaaagatattcccgtcgacgatccagtctggccaatcatcgctgactacatcgcacaggcatgtgtcaacctcaccgtcgccttcgcacctgataaaattattcttaacggtggtgttatgaatcaacggcagctctttcccatgattcgtgaaaagtttgccgcctatctaaatggctacgaagaagtcccaccactggatgactatatcgttcccgctggactgggtaacaattctggcattgccggtggcctattgttagctcaggctgctttaaagaacgcttaacaccttgcaaaaaagtccgccgatacgcgtttaaacgtatcagcggacttttagtttacagtcaatttgtcattcggttaatgaatatatacggttaaaacagtgataaatccaaaaaccaccccgggacatttgaaataataacgggccaatccttataagtcttgaaccagccgtaaccagtccatagtatcccattaatcattgccacgagtggttgtagcggcgatactgggtcacctgagaaattcgaaatgatttgtggaatatacgacacgtacatcgcaatacacgtaaatgtcgctaacttactaatcaatttcagatatttaactcgcttgggatccacagcgtccttaccactgggatattcaccattatcaactttatacttaataaataatcaccttcctagctagttattatactacataccactcatcacgcaaaaattcgcgttcgttaaattgtatcggcaccgcaacaatcctcaactattcgcacgttgcgcgcaagttgaaacccagcattccccttacatcaaaattgattgaccctatcaattagtttaatttgtggaagaattcccttaatttagctatactcatctgtcactgaaaccgatatcatacataccagcaatatatagatttttgtattttacgcgttgtgctagctaatttgtcatgagtcatgattaaagtaggcaaaataattaacgtcaaaagcagtcagcttaggctcgctggaaagagttcgggttagcgtaaacatgcttagttcaccctacaccgacctccaggcatttctgccaattgccagagcgcggtagtcaaaaatctaagtcgaggccacgttttaattacgattcatgcaatcatcgctcacataacgcggatatgtcaattttgcttagttcacaggaggatatcgctatgagacatggacaatatcgctacattgttggcacactagctttgataacgactgctgtaggtttagtagcttgttcgaaacagtcagctaatcagcagatcagttaccgtcaaacggctgaggccacccttgataaggggatggataatcaacccgaagcaccgtactggtttccaaaacaactgctgaaatggcagttgagcaaggataaagcagccaagtacaacaccgcctcggttccactagccaaacggatcgataaatggcaactgccgacggttaacaagacccaggacccaaagatgaaggtcgtcgcgttatccattatgaatagttcaactagtggcaacgcgcctcgcgggattaatacgttcgatgcgaatgtcttctccaactggcagtatattgaccaactcgtctactggggcggttcggcaggcgaaggtttgattgtgccaccgaccgcagatgtcatcgattctgctcataaaaacggcgtgcccgttcttggaaccgttttctttccacaagtggttagtggtgggaagttaaagtggctcaatgacttcttaaaacaagatgctgacggacattttccgatggctgataaactagtcgcggttgcgaaagcttacgggtttgacggctggttcatcaaccaagagaccgaccccgaagttaaaagttttgattcggcttccaccggaaagaccgcaaccagctcaactagtaatgggctgagcaaaaagcacgcccaactaatgcaacagttaatcaaagaatacaaacaaaaggccggctccaagctagacctgatgtggtatgactcgatgacgaaggatggtaaaatggattggcaaaacgcattgaccaaagaaaaccaatcttatctagtcgatgccaatatgaaaccagttgctgactcgatgtttcttaacttctggtggacgaagaagcgtctcgccagtcaagaattactcaaaaagtcacacgaacgcgccgaaaagcttgggattagtccttacaacctctttgcaggaatcgatgttcaagctgacggaaccgctacccccgttcgttggaatctattcgctaataaacaacatgtgccatacacgtcgctaggattgtacgcaccggactggacacacgcttcttccgatacggttgacgaatttcaagccaaagaaggtgctctgtgggtcaatgatcaaaatgatccgtcccgtagcattccgtcaactacttcaacacattggccgggtgtttcaacatacgcggttgaacaaagtgccattacgaaacagccctttgtcactaatttcagcttaggcaatggctataactacttcattaaggggaaaaatgtttcgctacgtgattggaacaatcgctcactgcaagcagtcaatccgacttaccgctggttaatcaataatggcaatggtaatgcgttaaaggccagctttgactacactgacgcctacgaaggtggcaatgatatcaagttagccggcaaaatgcgtaaggacaccgctagcacaatcaaactctacaccacggacctagacgtcactgccgatacccaggttagtttaaccgctaaggcatctggtaaatctacagctaaactagtggtgaccttaaaggacggccgcactaagaccatcgcgggtgaccggacactcagcaagcactggacgaccgttagctatgacgttagtcagttaacaaaaaaaacaatcaaaggccttagcctcaaaatcagtgccgccgagactgatgctagctacagcgttcaattaggtcgcctcgcaattaccggcaagcagcaggccgcgccgaaaaaggtcaaccaggtcaccattgataatcggaccttcgacgaagaaggcaagtacgccggtgtcaacctgagttggcaagccaccactaaaaataagctggatcattacgaaatttatcaggttaacaatgacggttctcgctcatttctgggggccactaacacgactaatttctatttaaacgcgttgaaacggaatgggcagcacaacgagaccaatctgatggtcgttccagttgatatttggaaccaacgtggcgatgcttctgaccaagttaccttaaaatggccggataatcgtaaacctaaagcggcatttacggttaaccgcaccctggcagctcccggtaacacgatcaagtttacaaatgcctcatccaaaaacgcaaccagctataaatgggaatttgacggtgccacaaagacgaccagcaccgccaaaaaccccacggtcacttaccgtaaggctggcacttataacgtcacattaaccgctaaaaataaggatggccaacggcacgttacaatgaaaaagctcattacgattacaccgaaagctcaaggcgctttaaccttactatccaagaacgccaagaccagtgcctccggatacacgaatagtagtgaagcacctaaaatggcggtggatgggaaactcgatactaaatggtgtgcaaccggtaaggcaccgcataccttgacgctggatttaggccgtcaaacgactgtgagtgcggttaaattagcgcatgccaaagctggtggcgaaggtgctgatatgaacacccgcgcttggaccattcaggtcagcactgatggcaaacgctacacggacgttgcccggacctacaataacacgcaagccactagtctcaatactttcgcggctacttcggcgcgctacgtccggttagtcgtcgataaaccaacccaagttgctgacaccgccgttcggatttacgaaatggacgtgctaggattgacgcaaacactcaaataaccctaccgatgctatttgaatagaacagccgagcccctcacttggaaatcgatatttccaagtgagggactcttttatgtccagacactaaaaaggcccgtatcagctgatacggaccgatttagaagttaggttggaatgaattgagctcattcttaggttggaaacttgattgtggccaggtacggtcagaccacaatcaagcgttcatatttacttagttgttacggtgctagcgacctcgatagcttgcccattaagttcgatagtcagtggttccccactaaccagttcaacggtcgtaccctgttgatcgacatccactttaatcaagcgaccgcggaagttaacgtggaattgataatgggtccacgctttaggcacaaacggtgcaaaggctaaggtatcatccttaactcgcataccagcaaagccttgaacgattgcgagccatgaaccggtcatcgacgtaatatgcaagccgtcgaccgtatcattattataattatcaagatcaagacgggctgtccgttcatacatttccacggccttatcctcataatgcaagtccgctgctagaatggcatggacggctggtgaaagactggattcatggacggtcaacggttcatagaaatcaaagttacgtttcttctgttccgccgtgaatttatccatgaagtaatagattccttgcaagacatccgcctgcttgatatacggtgaccgtagaatatgatcccatgaccagtgttgattgattggccgttgatcagcaggaatacttgaaactggcttgacgtccttatcaaggaagccatcttgttgaacgaagattcccaatttttcatcatacgggaagtacatccggtcaacaatatcttgccactttgcaagctcagcatccgtgatttgaagtgctgcacgcttagcggcatccactttcttcaaactcgctaacgtgtattctaacgtccagcgcgccataaagttcgtataccaattgttattcacgttgttctcatactcattaggaccagtgacaccgtgaatcatatactgttgtttccgttctgagaagtggacccgatcagcccaaaaacgtgaaatccccgtcaaaacgtcgattcctttagtcttcaagtagatctcatcaccggtataacgtgtgtaattgaagatggcatacgcaatagacccatttcgatgaatctcttcgaacgtaatctcccattcgttatggcactcaattccgttgaaggtcaccatcgggtacaaggcaccagccaagccctgcattttagcattatggaaagctccagcaagctgattataccggtattccagtaagttctccgttacttctggtttcgccaatgaaaggtagaacggtactccgaacgcttcggtatcccaatacgtcgcaccaccatacttttcaccagtaaagccttttggccccaggttcaggcgcttatcttcgccatagtaggtcgagaataactggaataagttgaagcgaatgccttgttgtgccgcatcgtcaccgtcaatcaacacgtcagataactgccagcgtttagcccaaccatcaacatgggcctgccgtaagtcctcatatgactgtgtgctgaccgtttcacttaattcggctaagccagtccgcatcgccgccatatccgcgtaatcccgtgaagtcaccacgaggactcgtttttcaaaattcttggtttcatccggtgctaacgttccccggaagatatttgtaactgccttttcggtttctggggcgttaatacctcgaaaagccgtttcatgaagcatctgcatgccgagcgtaaagcgcggtgttccgaagttattcggcttcgtttctgcaaacatgctgccaccagtaatcgcatgactcttgtctagcacttgccagaactgctcatcatagttcgcatcttcattgaagacgtccgcatcaatttgcgaaataaatccaatttggaccggttccgcatccaaattgtgaacactatagtgcacatcaaataactctttttgtgcaacgctgacgaaccgatcaatcatgaattggacgcgcttttcacccttggtaataataaatgaacgccgtaaaattcccgtatgcatatcaagatccaacgtaaagtcactgactgtgtccttcgccaaatcaacttgatcaccatcaatcgtgatattgactttgatgaaattgaccgaattgatcaccttaccgaaataatcgggataaccgttcttccaccagccgacccgggttttatcgggataccagaccccaccgatataaatccctttgagggtatcgttagaatagtgctcttcaaacattccccgcatacccatgtagccgttaccaatactggtcatgctttcctgcaatcgcttatccgtcggtacgagttcatgactaatgacgtgccacggatctacttcaaaaatacgtttcattgttgttgctcctccgtcgttcgaaattaccgaataacatctttagtttcagaatcaaagaagtgggccttcggcatttcaaaagcaacttccacattctcacccgggttatgataatcacgtgcatccacttgggcagtaaatttagatttgccagctgtacaatataacatgctttcggcacctaagaattcagaaacgacgaccttcgtcttaacaattgaatctgacatcgcttcaagcgcaatttgctcagcatgaatgtcctctggtcggatacccacaatcatctttttctggtcatagccttgagcctttaaaactttcaattgaccttccgggacagctacgtcgagtccctcaccatcagttacccgaccatcatgtaaggtggcattgaagaagttcattgaaggtgatcccatgaagccagccacaaattgattaaccggttcgttatacaattcgtgcggtgtcccaacttgcatgatcttaccgtcattcataatgacgatccgatcagccatcgtcatcgcttcaatttgatcatgggtgacatagatcatgttggtcttcaagcgttgatgcatttgagcaatcgtagtccgcatatcgacccgtagcttagcatccaagttagataacggttcgtccaataggaacgtccccgcgtcccggacgatggcccgtcctaaagcaacccgttgccgttgaccaccagataaattggctggtttccgttgtagataatcggttaagcccaattgctcagcagcgttatccactcgctttttgatttcagtattactgtaagttttccgaatcttcaatccaaaggccatattgtcaaagactgacatgttcgggtatagtgcataagtttggaaaaccatcgcgatatcacgattttttggttctacgtcattcatgacttgaccgttcatcttgaagtcacccttagtgatgtcttccaagccagcaatcatccgtaatgtcgttgacttaccacagccagatgggccaatgaagaagatgaactccccatctttaatatcaagattcatatcggtaactgaatatttatcgttaccctcatattttttgtaaatgtgatcgagattcatttcaaccatcgaaatccactcccttgttttctcacttctaaactactattacacgtgcaatcgcccgcaaacggttgctttttgatcgattactcaaagctattaatcagctaattggactggtcagcaactttagttaccgccgtattagtggcatatttaattaatactggttgaccatcaactgtcagcttgccatccacaacttcagtaggaccatctgttaacagattttgatagctaccagctgctagcttagtcgcaactgctgtgacctgaccttttaacggaatccaggctgttaacgcttcgccagccgcacggtaagtaatcttaacgataccttcttctacgactgccaattggtagtccgcagcacgcagtaatggtagttgcttaatagtcactagcttttgaatcagtgatgtcacgtccccatgacgatctgcaaccatggtgtcccgatcgaacaatgatggttggtgttcggccaaaaattcttgcccgttatagattaacggaataccacgttgcatgaagatccaggtcaagttattaacggcttcagctttgctgtgcatcaagctcatcatgcgtgcattatcatgattttccaagaagcgcatcttgacataattaccagggaaagtggcatcttggcgttgtaacaagtcaacataccgttcgaccgtactgcgtccttgccagtaatctttaaaatcaccgaagacgtcgtaatcgtatgtcatatcaaaagcttgataaagttcactgtcagacagacccgtgtagccttgtgaccgcagttcctcaataaaaccactgccggctgactccgctaaccataacgtttccgggtacttcgcattaacctgtttccgcgcttcaagccagaaatcaagtggcactaatggcgcaacatcacaacggtaaccgtccacaaactggctccaatacaagagtgtgtcgatttgatactgccacaactcatggtgaccatagtctaagtctttaacgtcactccagtcgccgaccttattcgtcaactgaccatccgcgtcgtgataaaaccactctggatgttcggttgctaagactgaatcaggcgaagtgtgattatagacaatgtctaacatcactttcattcctaattcatgcgccctatccgtgagtgctttaaagtcagctaaagtcccgtattccggattgatcccacggtagtccttgattgcatatggcgaaccaagtgtccccttacggttgacctcaccgatcggattgattggcagtagccacaaaatatcggttcctaaatccttaattcgttgtaagtcagcagttacgccagcaaaattaccagcttctgagtagtttctaacaaagactgagtaaatcatctcattgcgtaattgcgtttgcgtatcgcgtgccattaatcttcctcatttctatgcttactaattgacctaaagcaacatggtttggtcaacttccggatctttgaattttgttttcagatatacccacaacacaacgaaggccaagctgagggactgcacggtcaattcgatggtgacatcaaaatgaattaagccaatccccatcgctaacagactcccaatccccatcatcatcaacgttaagttaacgccttcgcggaaattccgaatatgcgtgatcttattatgtcgtgacaagaataagaagaacgccgccccatttacgaggatcaggttgacccccacaataattaatccaagtgccatgagcataaatagaccaatcatcactttattgctttgataccaagaattaaccagaaacgcatgagcgtttgtctttaagttatggcctggcacatacttggctttaaattcactaccgaccgatttcacttgaaacgtactagcatgtaaattaatgacattcttgcgtcctgccatatcatcgttcgtgagatcgaagccagcaacattatccttagttttaataatgatttgatgtttgacatccttgaaccgctgatcacggtagttcgcagttttcattgccgtttgcatctgatcactggccatcattttatcaatgtgtggtaaaaatggtgacagattaaaattcgtttggtgattatagtaaaacggaatcggcatgaccattaccgcggtcaaaaagataaataaaacaataatctgtaaccaattaaactgatcacggttggcaaacattcttcgaggtgagaagaggctgccaaaaaaccggaccggaaaggcggttgttttgtttttcgtactctgcatctaatttcacccctactaatatttgagttaacccttgctgccaccagcgagcaatcctgaaacgaagaaccgttgtaagtagaagaacaaggcagcaattggtaacgcgactaagattgcccccgctgagaagagcacaacttgttgattttgagcgttattaatgaatgtctggagccctacggcaaccgtataatgtgattcagacgtcaataagaacttcgccatcaggtaatcttgaactggtgacatgaaggcccataacgcttgaaccgcaatcattggtttaactaatggtaagacaattgaccagaaaatcttgaaattaccagcaccatccaacttagctgattcatccaaatcatacggaacattgtcaaagtaacctttcatcagccaagtgttctgtgggatcccaccaccaatgtaaattgcggtcaagaaccagtaatggtccaaagcgttcaacatgttagctaagacgtagtaagcagtcaaagcggccatggttggtaccatttgaattacgatgaaaaacgttagactgaactttttaccagcaaaacggtaacgactataaacatagccggctaacgtcacaacgatgacttgaatgaccatacatgagactgaaataatcatggtattcaaataccagctaccatacagggtttgcgtaaataagttcttaaagttaaccaacgtccacttaccaccaaaatcaaggacgaaggcttgcacgttagcatccttaaacgccgtgatgaatgtgatcaaaacgggataaataataataattccgagaatgaccatatacagatacgtaaagaattctttccagaaacggtgccgacgcgcgctattttgctttgaattggcattcttaggtgccactgcttgtgcattatccataacactagtcccccatttcaaacgcgtgggtcttcttgaagacaatcaatgagatcccgataactaagacggaaataatcaacgtaacggccgcggccaatgaatactgtggtgacgtccccgttgttaacttgtagatccatgagatcaggatatccgtcccaccggcgttagcaccgacatcaccagggccaccttggttaaacagatagatcatcgagaagttattgaagttaaacgtatactgcgtcacaaagattggcgctgcaatagcaaaaatcgttggcaacgtaatcttgttgaacttttgcattactgtcgcaccatctagcgttgcggcttcgtagagatcttctggaatcgcttgcaggataccagtaatcataacgtaaatgtacgggaatcctaaccaaccttgaatcataataatagcaactttagtccagaacgtatccgtcatccagtggatcggcgcaatgtgagcaaatggaactaacgtattccataagccgatgacctgcacattgatcgcaccagctgaatcattaaaaatgtttgaaaaactcataattgatacaaacgctggaatcgcccaaggaagcaagaagatcactccgaagaagcgcttacctttgatgaagttttggttagcaattactgcggtggcaatcccaataataatttgtaacgtggttgcacatacggtccaaataacggtccaaccaaaaacagcgttgaaggttgcccggtaactactcaagaagaacattgatgtgaagtttttgaacccaatccaatccaataacatagctggtggaatatgcgcaaaatcatagttcgtaaaagccatcagtagtgtaaccaatactgggaacacaatcgtaaaaaccattaaaatataggccggtgtggttaataaataagcaaagccaccatctactaaactcgcacctaactctttaaacgtatgggagacctttttaccattattaattaactgtgcaacgtgtttcgcatcgtaaaggtttgcaatataaaatacgataaacacaattgtcaatagaatctgcaacgtcccatagatcatcatgaacaaagagttgtcttccattgagactgaacccaatgtgactaaattggcaaatgcgctaaagcccccgaagatgaactcagcaataaatgccaatagaataataatgaagccaacaccttttatggtctgaccgttatacagctgaccgagcccgggaataattgacaggcgttgcgctttctttacatccttgacttgcatgtcgcccgcacccctttcctaaataaattctaaatatcgtgcatttttccttttaaaaaggctgagacaaaacgaattttgtttcagcccccttaaattacaattttaattacttatcatacttttgtgagatattagttaagatcgtcttttgcgctttattagcagcttgctttggtgtcatcttgccgctagcagcattggtaaccatcgtttgtgctggtgtccaaacttctgacatttgtggtaagttgatcaaaggaacatccttgtcgtattgctttgaaacggccgtagccatgtcatcgccagtacttacagcttccttacgagcagctgtgtttgctggaatttcactagcagacttgtaaagcttgttttggttagtcttgttagagatgaagtctaaccaagcttgtgcagcagtcttatgcttagagtagtttgagattgcccaagctttaccaccggcaaacgcttgataatctttgccgttattcaacttaggtaaaacagcaacaccataatcgatattagacttcttgtaagttgcagccatccaagggccatcaataacagcagcagtcttattagacgtaaattgtgaggtcacaaagttttcgttagaagtgacattttgcatcccacttggccagtacttcgtaaaccacttcgtcatgtaagttaaaccttcaacggcgccagaattgttcaagcccatcttcttggcgttcgtattgccatcagcaaagacgtaaccaccataacctttgatgacaccaaaggcattgtagaagtttgtccattgagtcaagaaggcaactgacttagtcttatcattagcgtaagcatacttcttgtcagaagctaacttttcaagttccttgaagttcttaggtgcagtcttgattagcttcttgttgtagtacagaacgtcagattcgatcgttacaggcgctgcataaaccttattcttataagtaacagatttcttccccgttgcgttgtaacgaccactggtcaacttgactgttgatagttgaccttgtgacgccatttgaccaacccggtcgtatggtgccattaaaacatcaggacccttgccggaaggaccatccagcttcaaagcatcgtcttcatcaagcatggccttgtatgaaaccttaaccttaacgttgtacttcttttcaaactttggaatcaccgatttcatgtatgacttatatgaaggatccgctgaaacctttaacgtcttgtccatctttgaactactagatgaagatttactattaccacaacctacgagcgtgagtgctaaaccagtggctaggacacccatccccaactttttccaagtactcatagtgcttcctccttgcgaagtatcttaattcatttaccataatttattatgcaactgtgcaaacgctttcgcaagcgttttcgtaatgttaacgttaacagaatcataccaaaaataaatcctaacgcttaaaaacgttaggatttattggtccatcaacctttataccaatttatataaagattgataagttaattaaaatacatcacatgatttatatataccaattttaggataatcatgcactcacattgcttatgccgatttaacgactaagctactccaagctggtaacgtcacttggcgtcccctatatgttgcaccaccctgtacaagcaacactttaccaccaacaaacggcaacagatacgtttgcgcttgcgcacttaaattacaaactatcgctgcttgtttttgaccatcatcaatgaggtaggtaaagagttgttcagcacttccgagcataatgaactgaccattagtaaagggtgcgcactgctttagctgcagcaactgttgataatagtgataaatactgtcggggtcagcgatttctgcttgcgcattcatgtcatcagtatcaccatgtttccatggtaagtggtcagagaaaccatgataaaccgtattgtcccattgcatggggccgcgccccgccattttatgagtttgattcaacatccgcatgatttccaccttagacttaccagcggcttgagcgctcgcaacaaaggtgggtaccgtctggtcttcaaagtccgcaatatcatgataacggatatttgttaatcctaattcttccccataataaataatgggaatgccacgctgcaaatacagggccgtcgctaacgccttggcacttgcttgcggataatcaggatcaccgtaacgcgtggcgacccgagccatatcatgattattccagtaaagtgttggtagactggtgtctgctaaagccgcttgaataccgaccgtattttgcttataggccgtcacatccatcggtcggggctgaaatgtgtcggagaagctcggatcatcctgggtattgtcgtccgcaaaagttctgaacgtaatcacttgatcacactcatccgtacctagtgtcgtatagtcgaccatcaaatgggggtcagcggatgacgcttcaccgacgacgtacgtatccgggtgcttatctttgattgcggcgacaaagtcgtgtaagtactgatgcactttcggtaagtgggcataaaacatatcgctaatgatgggtgtcgaatcaccagtccgatttggataagtttggcgaaaatctgctttagccagatgaataaacgcatctaaccggagaccatcaatccccttttcaacccaaaactcagcaacatcacgcatcgcctgttgcactgccggattcttccaattgaggtccggcatccgtttatcaaacaagtggaaataatactgtgagccgcctgccggatccttcgcccaaacactgccaccgaaaaatgagccccagttgtttgggcgcccaccatcggctgcgggatcttgccataaatagtagtcccgatacttactctgtggatcagcgagagcttgcttgaaccatggatgctgatctgaagtatgattcaagacaaagtcaaagataagatacatgccgtgctcatggaccgttttaatgagcgtctcaacgtccgtcatggtccctaagctcgaatcaacttggtagtaatccgaaacatcgtagccattatcaacctggggtgattgataaattgggtttaaccatatcgtggtaatcccaagttgcttcaaatagggaatcttcgcggtaattcccggaatatcaccaatgccatcgtgattactatcgttaaaactcttaggatatatttgataaatcgtttgttgatcataccaatgcttgctcatctatccagactcctctttaacgggtcgattcagccaccgacaaccgtgaattaatgatgattttttcttgatcatgccgcccgcgagaacgatcagtatggttgatattagccaataatagccgtgcagcagctcgtcccattgcttcaagcggttgcttcatcgttgtcaaccgtttggctgcaatctgatttaataacacgccatcaaaaccgataatgccatattctatgggaacgcgaccaccttgattaataattgccgtttcaacgccgatcgccaaccgatcacttgcacaaataaacgccgtattacgtggaaaaccagaccaatggctcttcacatacgcagttgcaacgtgtgaatgattggctaatcgaataatctgagcgctaatatgatgtgtcgtgacgtactctcgaaaacctcgttcacgatctagctcaaacggttcggcaatagcgataccaataaagacaagatgcgtatagccctgttccgcggcataacgtgtactttcccagaccgcctgataattattagtatcaacgtagtcgtatccctgacgattgctaccaacaaagacgactggctgattaagacgttcgacccatgcgtaatcggcttgccgaataccagtcaaaatatagccatcacattcgccaacctcatagctattgcgcgtcgcaatctgcaaggcgtattgatgttgattcaattcattcgcaatccccgcgagcaacatcatgtaatagggttccgtcgtgtccatgtcttcaaaaatcgttaattttacaacccgggttctccgccctactagggctcgcgctgccgcattcggatgatagtctagctgtgtcatcacatttaaaatcatctctcgaagctcaggacgaacctgttccggatgattaatgactcgtgaaactgtcatttttgagacattagcttttttcgcgacatcgtttagcgttatcataatcaaaatacccccctaacttactactgtaaggacttgatttggtggacggaatggcgtttaacaatttgatgaggcacaattactgccgttgataattcatcagcaggatggtcagccatcgcaatcttggccgcttcttcacctaaacgctgtggaaagaccgcaatcgatgtcagcatcgggtgcgctaaatcagaaaaaatggagttattaaaaccaatcagtgagaattgtttaactttccagttcggatcattatggagaacctgttgtaatttcaacgccaacatatcatctacggccacaaacccggtaacatctggatactgttcaaaaaacttatgtagtgttttaacacccgccgcatgagtctcaaaccgttcttccaacataatatttggtaactgattttgcatcattacacgttgatagccaagcatccgatcactttgcaccatccgtgataaatccgaatacaaaaacccaatgcgccggtgtccatgatcaattagatattgggctgcatccgttccggcttggatattatcattatcaacatacgatgttttattgacgtcttggtaaggtttaccaatcacaacgtattggacatcaaattgcttcaagcgctcaacaactgggtcatttttttcagaatacagtaaaataaaagttttgatatggccttgtgcaatcatgacatcaatattatgcaccagttcatcacttgaaatccccgttgctagcgttgtcattgcgccattcttactacaaacttcattgataccccgaatcatctctaagaaaaatgggttagaaaagatttcgtgatgatctactggtagtaccaccccgattgtattactagccttagttgctaaattctgcgcattaaaatccggcgcgtaatttaactcccgcgccgctttaatgaccttgtcacgtgttggcttactgataatcttgctaccatgcattgcacgtgacgctgttgaaggcgaaacacctgcgcgctgggcaacatctttgatcgttgccatcatgatccccccgatctatttgaatccatctcattaaatataaaacgttttcatcgttattgcaagcgattgcataaacttgcattatttatttaattatactttataacaaaaaactgtgcccaacaaaatcggcacagttgtgagtatttaactaataattgtttccagaccagctgccaaaataccaccaagcaatggaccaaacattggaacccaggcataaccccaattagccaaccctttattaggaaccgggagaatcgtgtaggctaatcgtggcgcccaatcacgcgccggattaatcgcaaagcctgtggttccacccaaggtctgaccaacgacaacaatgagcagccccaccatcaatggctttaatccctgggtaaagttaccgagattcaacaacacgaagataaagaagaaggtcgcaatcgtttcgcttagaaaattaaataccgggttactgatggctggaccagttgcaaaaatgccaacttgattgccatctgccgccgttttggcagcttgaaagtgtgggtagtactgaataataacgattaccgcgccgataaaggcccctaagaactggcctaataagtacggccaaacgttagccattggcaaataaccgaataacgcaaaaccaactgtcaccgctggatttagatgaccatccgaaccaaattgtccggcaacatagaccccaaacgtaacggctaggccccacgccaagcaaataaacgtccaattctgatggcgtgcataattaccctttaaattcatggcggcaccactaccaaccccaaatacaattaacaccatggtacctaaaaattcacctaaaaaaccgtgcatgtttcgtcaccatcctacttgatttttaatggcgctaattgagcttcgacatccgcaagtggcacagccgcctgtaatagcgatgcggccgtgtaggcactctcaatgagtgccgtatcatataaatggaccgttttatcactcatttcaatggccatttccagattcattttggcactaccaagatcataaaaggccaagagttcatccgcatgatttgcatcaaacgcttgtgtaattttggtcaggctggttccgacttgattgtcttccgtaccaccagcaatcgtaatcgaaacgtcctgggcaacttgccctaacaaacgctgaatacctgcggcaatttctgggacgtgtgaaacaactacaattcctaaactcataagattccctccgtatccagtaacgttgtaaataaataaccactcgagacagcacctggatcaaggtgtcccactgaacgttcacctagataggatgctcgcccttttttagccaccatcggttcggtgctagcaactgcatcatcgataacatcctgcgtcaattcgcccgcttggaccgcctgaacaaccggcgcccacacatcaatcagcgtcttatcgccggttgtcgcgccaccccgcttttcaatcccagctaatgcagcggccaacaatccacctaaatcgctatcaatcttactttgctttgccatttctaagaaagctgttccgtacaatggtccagaagcaccaccgactttgctaatcaatgccatcgccgttgcttgaaatagtttagttatgtctgctggttgcgtggcaagtgctgccttaactgctgctaggccccgagccatattacccccatggtcaccatcgccaatcggcgtatctaattcacttaggtaactttggtgttgttcaatctgatcagcaaacttattcagccatactgttgtgttctcaactgttaacattctcaattcctccttatgaccacgcgattgttttgaccgggtactgtaagtaatctagccattgagattcagcaacatcgaatatcgtcagtgaaataccggccatatcaatcgaagtcatataattaccaaccttcataaaggccggttgaatgtgccgtgttgccagttcatccaacaagtcatggcaaaagacatactgatccatcaatggcgtcgctcccataccattaaccaagaacgcatactgatgatctgactgtaggtgtaattcatcatctaatttacctagcaattcctgaacaagttgtttggatggcttgattttttcgcgccgataacctggttcgctatggattccgacgccaaactcgatttcatcatctgccaattcaaagccaggtttgccgacttccggcaccgtcgctgcggataatgcgaccgcaatcgttttaatccgtggtaaaacatgcgttgctaaactttctaaatcatccaaatcagcgccttgatccgcggccgccccaagtatcttatgcataaagatagtgccggcaaccccgcgacgaccctgagtatataaactatccttaacagcaatgtcatcatcaacgacaatcgatttaacttgaatatcatctaattcagccatatctttcgccatatcgaaattcatgacatcaccagaataattcttcacgactaagaaaacgcccttaccttgatcgacagccttaattgccgcataaatttggtctggcgtcggtgaggtgaaaacctgtcctgccacggcagcgctgagcatgccaggaccaacaaagccggcgtgggcgggctcatgaccactcccgccaccactaacaattccaacttttccccgcattgaatcttgatcactacgaaccattgcttcggtatccggtaatttagttaaatattgaggataggcacgtactaacccatcaaccatttcgtcgacgacattcttgggatcattaattatttttttcatttttgttgtccttcctttctcgaattaacaagttaattgtaaatgaatccgctttcaaaaataatggacagttttgttattttgtccgccagcttccgacaagcatggtcattcgaatgcgttataataaaatcaaactaacaatataagaaggtgttcccatgcaaatcattaatgaacctcaaaatgccctgagtcaagcaactcagggcattcaatgggcctatccaaatttaacatgggtaccaaatacattcggatgttacgacagcaactttcaagatgatcagattccgttaattgctggtgggggcagcggtcacgatccggcacactggggttatgttgggcctggtatgttaactgccgcaatcatgggaacggtttttcaaccccctacatctcaagaaatcgttaaagtcacaaaacaggtgacacgccagcgtcgcgtttttttcattgttaaaaattttccagcagatgttagtgcgtttacggctgctcaacaacaactgaaaaaggaacattggcaaactggtctatgtattgtggcagacgatatttccgtggatcatgaatctttaaaacagcgccgacgaggagttgctggcacgattttagtgcataaaattcttggtgccgctgcagctcagggggcctctatcgctgaattgacccacatcgctgccgccctagtgccaaacattcacacgattggggttgctgctagcggtgcccgcattccaggacagtcaacggcatcgtttaacttgaatcctggtgaaatttattacggtatcggtattcacggggaacccggttatcggcgtgaaccttttcaatcgtcagaacgactcgcacaggaattaattagtaaattacgtctcaactttaagtggcatgctgacgaccattacgccgttttcgttaactccctcggtgggacaacgcccatggaactcatggtgttcaataatgatgttcacgaattactcaccttagccgcactaacaatcgacttcaacaaagtgggaacttttttaactgctaacgggatgcatgggttgtcattaaccttactcagcctagccgaccctgactggttaactgctctaaaccgacccgtcaaaactgctgcttggcctaactagttcaaaatttcgagtgtcatttcgatggccgcaatagcgtgctgagaaagcacctcataatcttcaggatgattcgcaacgatattatgcgttaacgattgtgcgattcccaagcacagcaaccagattagggccgccgtttctgttgtattggcgtgcgttagttcagtcaataacgtggctaagtggttaccgacaagtgccgtcacgtcaatttcatgctgcgtgttaatacattctgcataaaattgacgattcgcatctaactcgtaacaaactagtttaataatgtcgatccaaggcaaataattcagattatgttcaaccgtttcagtcagggtgtcatcaataaaccaggttaataattcatatttatcttgaaaataatcataaaatgtttgccgtctaaaatcggcggtgctcataattgccgtcacggaagttcggctaaagcccctcactaggacgacgtcatgaaaggcttgtgcaattttcttttttgtaatgtatgccattcaaacgcctccatactgccttttatcaacattgtagcgataactgcaacccatgtccaacggaagccatattccggattaattgaccactaggagaaacgctacataatgtcatagcgtttctcctagtgatatttttatattacttataaccaataatttcaggtctagtaattctcaacaaattctcctaaaatacattcaacacacttagggggcttcaattattatgacatcatcactcacggttcggcgtatcccgttactcggtgctttaattgccatgcaacttatcttaggaagtttactgtcaattcaactattgctaaccaagatatccttcgcgtttattattattggtttaacggcccgtttattttcaccactagttacagccggcagtagcgcgatttcctccctactcggaatgctgctcttcccaaagttcaccttttttcctggttttatcctaaccgcttttctgaccgggttagtctttggatacgcctttcaacatcaaacttcactgacacgcgttctcgtcgctaactttatcgtcgtctttattctcaatttgtttctaaacagcctctggcttcatctcatgtacttaacaccatggtccgttttgctaacaacgcgcatgatacaagaagtcataacctacgtctgctactcagttatcttgatcgccctatttaagattccgattctgaaccagctcaccgcacgctttaagtgacggtggtcattaattatttcgttaattaagtaatgactggtggtacttaatttaaagctaagtaaaaaaccaagggccacagtacattgctgtgacccttagtttttgtgcaaacaattgattgtcatacgaccccgtcagacctaccaacagtgccgaactcgacttcgtattaatttaatgctgccaccattccggccaaaaattcagcggcaccgcccacgaaaatttgttgtgaatgcttgaagattggcgcttgttcatccgtattcacagaaagaacgtgttgcgcaccagccatgccagccaagtaatcatcatcaccagcgacgccaatgttgatcaagacttctggtgcaaccgtcactgctgaggcaccaatttgttgctcaatgctaaattgttccatagccgttagcggctgggtaacagccaatgctgcaccaatccacttggccaattgttgggcttgaagcaatactgccggttccatcgcgcctcgacctaatgccacgacgcgtttcgccgtagcaatactgccgacattgactggcacatccctagtcaaattcaagcgttttacgacccgatgtaggtcggccacgactaggtgctcaggagctgtgtggggtcccgttgtcgggacatcggccacttcgtcattcaggctcgtcgtggcaaaagtcaacgccaattgcgtatccgtgccaacaatcaacggtagtgtcgccacgtcattttgcaaggcacttaacggcgagtgttgcgtataggctagatcaccgatcaatggcatcaaaattttaaacggcgccaaggcattttggctggcaaacattgccgccaattgcgctgcgtctgtaaatgggcgctcatcatcggcctgttgggccgcattgtagacactagtctgtaaggcggccgtaatcgccattgctggcgccaaggcagttaacggcggctgttctgtcagcgctaactgtcgtgcctggtctgtggcatgttgccatattcccgctgtaatcgccccggcaaataattgccccaagctttgcgcccgttgcatcactcgttgtccttgtcccaattgaccgatttgatcagcggccgtaaccgggacatcggtgagttgaacatccgcgatggtcaatccgtgtaaccctaaaggggttattggttggctgaccgtgacgcctggctgatcagcactaataacaaaggcccctgtagcattcggtggtgtctgtgcgagaactaaatactcagttgcctgtgtaacattcaataccgttttaaccgcaccggacagttgccagccagctgttaccggcgttgctttgacggtactactagccatgacttgttccggtaatgccgcgagtccaaaaacacctgattgtgcacaataccgttggcgttgttgcggggttccaaacgttaatattgcatcctcaacttgccaactactggcaaaactcatagcgagcccagctgaactttgcgccagcgctaatgtactcaaaacccgttggctcaggcggtcatctggtagtggatcgtccaaagccaattgctgggcaagcgttgtcagtgtcggtcgatcgactttcccagtcgactccatctgcatggcgagtcccatcaattgctcacgtgccagtgccatcaaccgttgccacaatcccgtctgtcgtgccgttaaatgtaattccattccgatccctcacttcatccgtcatctattaagtctaacttaccacatttttagcctgctaacgaaaaaagcgaataaacattatcactattgaacgctgccgaatccaccggtcgaaaaacagtcgtccggattaaacatccgtcgactgttgaaatacgtattattactgctggtcatctaaatctgccgccataaacccatgttctaaaatcgccatgtaggtttttgcgcgactgaccacccattcgatatcggccatcgattcaacttgatgattctcacgcatataggtctgaaattccataaaaatctgattgtaaacacccataatcaaagcaatcgttgcatcacgatcaacatccgcacgcagcgtcattttatccagcacctgactgatcatttcccgggaaatagtcatcgacttagtatacaggatcttcatttgtgcctgtatctttaccggcaagcgctccagcgcgccatacgcgtcaatcaagaccttcatttcatccgggtggtctttaccaaacgccgccttgtaacgcgcactccgcaccatcaacgtgactaggtcatctggaacatcaaaaacttgttgattaatggtggcaataatcgtgtcagtagcaagctgaacagtggccaaatacaagcgctgtttgctaccgtaataatgaaataataggcccttagacaccgttgccgcggacgcaatcacatccgttttagcatctcgatagccactgacggcaaaggtgtgcatggccgcgtgcataatacgctcgaccttcgccgggtctttaggaacaggttgttttactgccatgtcacgcactcctttcgtttactgagctagatcacgccgccgataacttagtgctgctactactaatattagcacagttaataacaggcaccagctacttgtcgttccatctaagggcttgattggtaccttgttaacaaagccaaggggcgttaaacggcgtgcccattttggcaaatcaatcaaattaccaagatacaatgagaagaaggcgtaaaatacccagatccacgcagcataccgccatttaggtcgccagcccgctaaggcactcgtcaccgctaccatcactaacatcgccggtgcataggccgcaaacacgtgccaataggtcacccaactgatgggcttgaccatactcgtcaggcccatcaaatacataccacttagaccggcaagtaaaacgagcagtcccgttacgattgcccagccggtatagcttgcccacacgtgccaccgtgatgtggccgtcgcataaacttgatgtagatagcctttttgttcatcattgaccagtttgagcattaactgtactgctggaaccagtgcaacgatcaccatgacgatagccaacacagcaatgaaatttttgacgatcaagcgattcgctgctgctaaagctaacgcacctagcagttgtttgatcattggattgctctttgccagatcgccaatcgtattaaagacggacgcatacgcggcacctaagataaagttccctagtagccatgcaataatcagaccatgtgcctgccgccataatagggtcacgggaccccgcaacaaaccgctagcctgtcgccgaccgcgccgtgattcgactaagcccgcgcccaagtcccgataagcattaagagctgcagccaaacttaaacaaccaagacccagtaatacatacagaccgattggtaaccaatcattggtttgatacgcatctaatttttcaatccaaccaaaggggatccaccaagtcaggtctggacggttaacatccgtgcccattcgtgcaacgtacatgacgcccagtagcaaatagctcagcatcgtcgtaccactcgcactagtcattacctgtgcaagtaacagcgtcaacattccaaaagcccagcctaagccccctaagcccagaccaattaaccaattacctggcgtcgtcgctcccggaagcttggcgacggtcagcccgagggcaaaaagaaaaccaatcaaaccatttagcgccgttaactcagctgccccggcgaatagtggtgctaaccgaccgaccgcgtgggcacgcactagctctagcaggccatcatcttcatccccgcgcgtcgtaaccacggccaccatgatattcatcacaatcatgacgatggccataaaaaccatcatttcagttgcaaacaccttggccgtcgtatatggcgatttggccgaaaacgcaccaaataaggaaatcatcgcgggcgttttaagcgttttgacaatttcattcagtgccatctgagtgccataaataccatcaaacttcgcggcgatggccgtgaatagccccgtcaacacgacgacccaaatgagcaactttttccaatctcgtcgtaagttgaaccgtatcagtaatccggtacgagcaaatagttgtgttgccatcagcatcacttccccttcaccggttgttgttcggtcgtgtaatagcgcatgaataaatcttttaacgttggtggggtcgttgttaagctgatcagtttccgactcgccaagtactgcactaccggcgtcaactggtcagcatcgacggctagactgacgtggttatctccgtggcgcgctgtgaccccgtgaacaccagctagggtggtcaagtcagccaaaggcagtcgtgtttgcacatcgaccgtggttcgggttaagtgccgcatctcagctaacgaccccgtttcaacaatctgtccctcacggataataccgatgcgatcacacattttttccacttctgacagaatatggctagataacaggacgctcttctctcgccgttttaaagccaatacttcattttgaaacgtctgctcatttagcggatccagtccggacgttggttcgtcaaaaatatatagatcagcatccgttgagagtgccgcaatcaaggccaccttttgccgattacctttagaataagtgcgcgcttttttacgcggatccagttcgaattgtttaattagcgcgtccgtcttagccgtatgctgaccaccgtttagtttaagaaacaagtcaataatttccccaccacttagattaggccataaataaacatcgcctggcacataagcaattcgcttatgaatcgccacactatcctgccagacatcgcgaccaaaaatcgtcgcctgcccaccactagcttttaaaattccaagtagtacccgaatagtagttgatttaccagcaccattcggaccgataaatccaaaaacttcccccgcgttgatttcaaaattaatatccttgagagcctgaaacttcccgaaatgcttttgcaagtgactaatccttaataacggttctttatccatatgactcactcccatccttcaaattcgagcatcttattgttgatgctgcaatcataggcgccgttgactagtaagtcaatgactagccagtcaatcagttaaaaatttcattttaaacatctaatccgcttgaaactggcttctgaggctagtcaagtcaacaaaaaaactgttttggcgataaactttactcgctaaaacagttttttgacatctgaatttctatggcagaaccagaaagatatatcgtcttcattagccactagaagatagttgggactaacccaccatccgcccgcaatgcttcaccagaaaaactgctagcaaacggactagcgataaacactgctaaccgaccaatttcttccggccgaatcaaacgctgaatttgtgatagtggtcgatgattaatcataaagtcatgctcccactgatcctttggcaaatctgaatcagcatacatatcatctaacattttctgaacaccttctgttaatgtcgagccgggcataaccgtgttaaccgttacgtggctaccaactgttaacttcgacagactcttcgctaaagaaaggttcatcgatttagtcatcgaatattggggcatttcccccgaaggcataactgcttcttcactcgcaataaagataatgcgtccaaaatcttgggctaacattgcaggtaaataatgttttgccaaccgattgccagacaacacgttcactttaaagaagcgttcccaagttgcatcgtcaatctcatcgtaagccattggcccaaagattcccatattgttgaccaatacgtcaaccgttggaatttgttgaaacattttgtcagcttgctgcggatcactaatatcatacggtgccgccactggatgagttgttgggtatgccgctgcgagttcatccacaaccgctgccaccgtatctgtgcggcgaccattaatgaccacatccgcgccttccttggcaaatgctaccgcaattgcccgtccgattcccttagtcgaaccagtgaccaagacccgtttccctgctaatcccatttccatgctcaaagttcctccgttctaatttaaattgctcgttaagtctaactagtttgatcaataaacacaaataatcggtcctcacgggtattaatctaactcgtttatttcccgggtaataatcgcaaaaaaagcacaccagtctcctggcatgctaattatgtacgcatcttaatccgcgcttgatttcgcatattcttctaacactggcataacgtagcgttgttctgcttgcttacgtgccatgatggcatcatccatatcagcaaactgctgattcaaaactaagcggccccgatacattaaccgtgcgacccacttctgtgagcatcggtcaaaggaaacaccaatgaccccgctccgattccggctattcggtttcaatcgatcgaccgaagttccttgataaagcggtaagttatcactacgtcccatatttttacgggtttgcggattttcaaaaatattctttcgactaacatctgcccgtaaacagccacagctcttcgtaatccctttccgtaaccgataactatcgacaactacttgtcgtccacatgaacactgacacaaccaccgtgcattaccattcggcgcactttcagcccgttcgataacggtcaaacggctgaaagtctcaccagttaaatccttaagtcgcatcaaaatcacctcactaagctttctgtgtaatcagctcaattgtcttcaacacaatcgagcttgtactatttaagttaacccgattatatgaaatatttgtgacgaataaaaaaacttttatagtaaaattcgcgcaatatccattaatttccagctgattaactaacactcaacctattccagctttgtcttttatttagaatactactattatgattatatgtcactttttatcatttatattatcatcagaccggtaaacacaaaaaaacgttagtctcagaatagtctaacgttttatatgttaattgtacaaacaattattgccaatcacacaaaccagcccagtggcgcgagccctaaccagctcagaacgttaacgttagtgtcagtcgcaacaaatggtcgtaaagtctgcttaatttctgtcgcattggctagcgtttgcagatcataccaatactggccctttttactatgacctactaaggtccaccgacctaacgactttaatgccggtttctcggtgtcaagatcagcagtcaatgcactcacaaaaacgtgcatcgtcggcatccaggccccgtcgtactgttcagtgtcacgccgtaactggctgatttgattctgcaaacgatgcgccgtccgatacagtcctaataccgcgagaagtcctactaacagcattagcatccagacgcctattaaatctgtatcaccccgatgaaggatcagaatcaaaaacaatccccataccacaacccctgcataaagactgaggttgatcgtattcatcgcccgatcacgtaactgcaaagctacttgcaaacgaatcttaggatcagttggtgccattgtcgtttgctgtaatgctggttggtcgctgccggtatacacaatctgaatatctggttgctgtacttgcacttgggcgagaacttgaaacgcgctgttactgttgctcatgtcagccgcgattgcttgcggcacatactcactaaagacccgataaatcgtcggcacttttttaaactgataccaatttccatgaatagccatcaataaatagcgtcgctgcgcttgcgcattcagccatgccaactcctgttcagaacctttgatcaaaaatcgatgccgccacatacctaccacttccattttaaaagtttaaacaaatccaattggtgccaatcccagccaacttacaatcgatacagaaacgctatcttccacaattagctgtagcgattgcttgatttccgcagcacttgccagcgtcttcaagtcataccagtacatcccgtgatgatcttgaccgacgtaagcccacgcccctagacctgccactttttctgtatccagctcagtggacatgtttttcaagaaaacgtgcatcgttggccgccaagcatcatcatattgttgcgtaatgactcgcagcgcattcgcctgtttatgcagccgacttgcttgccatgcaggatagaaggtaaatagcaaccatgctagcattccccaactggccacgttatcactcacattcaggctaatcacgatcacggccagtatcagaccaaccactaacctaatattcatgacatttaacaagtgtccccgttgcgccagtgcaattttcaactgcaacggtgcgtcctgacgatccactcgtgccccctgcaactcagtctgagccgtgcccgtataaatcacctgtacggctggtttcgtcaattgtagccgtgctaacaatttgaacggtgtgtgctggtcgtcgatttcagttgcaacattaccgctcacatattcactaaagacttgataccgcgtcgtcgttttttgaaattgataccagttccccctgatacgccgcagtaattgcccgcgttgtacctgctgattgagccatcgcaattcctgctctgagcctttgactgccatttgataacgccacatatactcacttccccgttaaattaacccattacaatcccgcctgctcacaaatctgattcaataattgcagtcgttttcgttcagccgccaaaaccgattcaccactccccgtgatttcataggtatgcacgtcattttcatcgactcgttccgtcattaaataatccttagtcatggcatgcaaattcgtaaataaggttcccaatcctagctgtagttgattattggtcatttcagcgatctttgccggaatcgcttcactggtaattggctggcgaacactgactaacactaagaacgctgcttccgtcattggttcatacttatcaattaatcgttgataaaagttagctggcatattttcatcccccttaatcagattattgaagcgctttctttttcaatcaatttaattatgggccaccgttttcttgaatgcaactccccagaataatttccacaaaaaatcggtagccactgattaacgcggttaccgattgctttaatgaatttgaacatccgctacgaccgtacttgtctcgtatgggaaatgtgattcggagacttcaaagggttgaccatcatccatgtaactaatctgattaatgaccaacacgggatcattcagagtcgcgcccattgcggcaacgtcatcagccgtcactcgggctgccgagataatacggtgtgaacccgcgattttcttgccactatgttgctctaagtaaccgtagaccgagccttcgaggacttgcttcgtcaacgtcacgatactcgttggcataatcgtatgctcatacgcccacaccttaccatcaacgtagcgggtccgccgaataacgtacaccggatccatctcatcgattaacaactgttccgcttcccgcttagtaggcaagcgagcttgtaattccaacaccttactcgtcacctttttaccggcattcgtttgcgttgttcccaggggcttgtctaccagcgtttcttggcgccgttcagtcaaaccaaagtccttgcgaacaaaggtccccgcgccacgcttggagtaaaccatcccttcaataatcagtaattgaatggccttgtgaatcgtaattcgtgtcgtatcaaaagtttcagctaatttattctggtcgggcatcaattcgcccggcgtatatttaccggattttatgtcttgtcgcagactatccgcaatcgtttcatacttataagccaaactactcacatccccttcatcatttggtcttgtcaactagtttaccccttttagtagctaattgaaatcatttgtatatacttttattggctttgtttaattaacgaccaatccaactaatcatcagcatccgtcactgaccgtatagccgaatgaatcagcgcatttgaccaccatttaatcagctgttcccgattttcccgttcaatctcgatgtaaccggctacatccgttcggttttacttgcacccccacagactttggcgtatgctttaatagttaaattcagattagaaaaagctgtgacaagatgagtaagctaattctcgtgcttagagagtcgtatttttggtgcaaaacgatgacgtggttagttgaagatggtcttgaagaagctactggggccatctcagtcggagcgatccgttacgatcatgataagtccctgtgggaaaatctcggtggtaacacgcaaacgcgtcctagaaagcattcgcttttaggcgcgtttttttatgaccataactgatctgaaattaacgcctgttcgcttttattaatggttattagaacttattcattctcaatacttaaggagtgttacactatgcaaaacaagcaatccaattcaattcgtaccgtcgtggctaccgggatcggcgccgccgttatttttgttctcatgaaatttgtcgccattccaacgggtgtgccgaatacccaggttaacgtcgcgatggggtttttagccttactaggagccatctttggtcccgttgcagctggtttagccgtgttcatcggtcacgccttaaacgacttcgtaacttatggttcgccttggtggacctgggtcatcgttgatggtctgattggggttgccttcggactagctaaaaatcggctcaagattgaaaatggcgtactaggaacggcaaaattagtctggtttaacatttaccaaatcatcgtcaactttattggttgggtgcttttagcaccaactggtgatattattatttatcatgaaccggccaacaaagtttaccttcaaggtgtcattacttggatcgccgattccatctcagttgccatcattgggaccatcctactagtcttgtacgcccggacgcggacccaacgtgggagcttaacaaaggaacgttaataacatgagcgcacccatcattagctttaaaaatttctcttttcaatataatagccaaacggaaccaactttacgtgatattaatctggatatttaccccggtgaaaaagtgttgattgctggaccttctggctccggtaaatctacattaggccggtgtttgaacggcttgattccgcagtcctatccaggaacagtgacgggccaagcaaggattgctggtcaaaccattactgagagctccatttttgcattatcccaagacgtcggtacggtactgcaagatcctgatagtcagttcgtcggtttgactgtcatcgaagatatggctttctcattggaaaatgatcagcagacccaaccggccatgcgacaagcaactgaacagtgggcccaaactttaaacctccaggacttattgactcaccgcccgcaggaattatctggtgggcaaaagcaacgggtcgccatggctggtgttctgatcgacaatagtaaaatcctattatttgatgaaccgctagcgagtcttgatccggcatcgggtaaagcctcgatggcactcattgatcagctgactcatacgcaggacctgactgtcatcattattgagcaccgcatcgaggacgtgttacagcaaccaatcgaccggctgattgtcatgcaagacggcgcgatcgtcgctaacgaccggccggaaacgattttgcggcaatcactcatgactcaactcgggctacgcgaaccattatacctttcagcgctcaaactagccggtgttgatctagcaacttgccaacacttggataacctccaagccttacaagtacccgacctcaccgcgacgttgcaaaactggaccgccggcgtacaactacagtcgcccaccgttcatgaccaaccgttactcgcaattgagcatctgacattcgggtacgatcccgccaaaccaatcatcaacgatatcaccgtcacacttcatcagggtgaaatgattagtctagtgggtcaaaacgggactggtaagtcaacattaagcaatctgattactgggtttttgatgccacagtccggcaaaatgcgatttaacggtcattccctagctgaccaatcagtcaaagaacgtgccgaccaaattggttatatccttcaggaccccaatcaaatgatctctaaaacgatgatttttgatgaagttgctgccggtttggtcctccgaggtgtcgctgacgatgaagtaaagcgccgtgtccaggccgttctgaaggtctgtggtctctatgagtttcgccactggcctatttctgcgctcagtttcggtcaaaagaaacgggtcacgattgcggccatcctcgtattagaaccggccatgctaattcttgatgagcctactgcgggccaagacttgcaacactatactgaaatgatgaccttcttaactaagatcaatcaggaacaacacatgacgattatgttgatcacgcatgatatgcacctaatgctagaatacacggatcgcacgattgtgttgggccacggcaacattttgatggatgctcgcccagccgatgtgttgaccaacgcatccattattcagcaagcttccttagccaagacaagtttatacaccctggcagaagcgcaccatttaaacccgacagaattcgtcgcaaaatttgttcaggctgaacgggaggcgcgctaagatgcaacatgaattattgatcgggtacaacgaccgtcatacttttttaaaccgacttagcggtagcactaaactactctgctttgttggcttatcagttatcgggatgatgacttacgacacgcgttacttaatcggggtgatgattttttcactgattctattccgcttttcaaaaattcattaccgcgatatcgcgttcgtgcttaacgttattattggtttttccgttttaaacttagtgatggtgtacgtctttgcgcctcattacggcgtctcgatttatggtaccgaacacttactactgggatctgctgatcactactttaacttgacagccgaacaacttttttatgaatttaatttgttattaaagtacacgtttgccgtgccactcgccctgatttttctcatgacgactaatcccagcgaatttgctgcgagtctcaataagattggaatttcttatcgtatcagctattccgtagcgattgcactacgttacattccagacgttcaagctgattaccgtactatcagtctggcacaacaggctcgggggtttgaaatgtcgaaaaaagcgcattttatgacccgtattcgtggcggcatccaaattctgcttccattgattttttcaagcttagatcgaatcgaaaccattagtcaggcgatggaattgcggcgcttcggtaagggaaaacatcgcacatggtacatggcccaacgctttaaacgtaacgactatctggcgttaacgttagttgctctgctgatcatcctcggcatcgccctctttaaggtcaacggtggccgtttctggaatccgtttaaggcataacgttgcatcataattttccaaaaaacttcgtcgaccatgcttatcgatgaagttttttgtttgcatctacctatcaagcctcacctgacttaacaacagcaacaatccccttattccacacgcaccatcctgttatgccaagattaactaaaaccagcgactttaaaattgaaaaaacaaatttcaaccgctaaactgaaactagatcttacaaaaagtaagcaaaactagcttgaaaggatgttttattgtgactagttttaacgaaccactcaaattcaaatctggcgttacactacgcaaccgcctaatgatgtcgcccatgacgacgactcaaagcttttacaatggtagtatcacccatgacgaaatcgactactacacacaacgagctactggcttaggtgccgtgattacgggtgctgccaacgtcgaagatctcggtaagggttggcatggcgagcttagtatcgcgcatgacacgatgctgcccggtctaagtgcacttgctcatggcattcaaagtcaaggtgccaaagctatcgttcaaatcttccacgccggtcgaatgacgcatcgagccgtcttaaatggcgaacagattgtctctgccagtgccgttgcggcccttcgtgacgatgcggaaacaccgcgagcaatgtcgattgacgagatccacgcaacaatttcagcattcggtgaagcaactcggcgcgcgattcaagccggctttgatgggattgaattacacggtgccaatacctatttgatccaacagttcttctcaccacatagtaatcgccgcaccgatgaatacggtggtcgcacgccgcaagaacggttccgctttattgatgaattattaaaggccgtctttgcagctgttgaccaatatgcggaccggcccttcatcgttggctatcgtttctcaccagaagaattcgaagaaccaggtattcggcttgaagataccctttggttactctcacaactacgggaaagtcgattagattacgttcatgtctcactcaacaactatgaccgtgtttcacgagacccgcagtatcaagataaatccatcatgacctacgtgcacgaagcgttacaaggtaaattgccactagttggtgttggttgcgtccggacccgcgacgatgtcaagactgtgttacaaactgccgaactagtcgcagtgggccaacaattactttatgatccaacttgggccgtcaaactcgctaaaaacgctgacaacaccatggttacggcaccatttgaagaagccgttgaggtcacaccacttagccggccgctgtatgaatttgcagcctcgcgctatcacagcgtcattaatagttaacctgtcagccgaattaaaaacgtccactgaaaaaatcagtgggcgtttttatgtttcacgtgaaacatttagactttcaataaccaattcagttgttgtaacgcacgctgatggtcaccttgatattgacgcgcaatatagtaataggctaacgtttcatgggccgttgcttgccggtcgacgggcaattgatactgttggtcaaagacctgttcaaatgcttctaatgtcggcgcagctggctgttcacgcaaacaaaactgtcgtaattccgatctagtcatccggtcacgggcaatcggttggcggtcttcatgcgcagccaaacgttgctgtagtgctgcttgcataccggcatccgcattgtccgcaagccactgttgagtttgtggcattgtcgtttgcatggctaattgttcaaaccaagccagcgacaatgattggccccaccgggtcgtcaataagtgctcccaatccgcacgttgggtcgcctgctgatgatactgccagccccaacaactattgaagacatcgtcataaaaacgcgtcgtttgttgttcatctagctgttgagtcacctgattaagtgcggcaacgaactgatgatcaagcatggctaggcgccgaacttgaatcttcccagtctgtcgatattcagtcaccatttgcccgaattgataagagttcaccaaagggcgttcggtcgctggtggcgtgattttttcaaactgttgcttcgccatcggtcgttccggacgcatcacaataatggccgccagctgctgtaaataacattgataggcgtgactctggcgcaaggtttgctcggccttcacagcactttgctgcgcttgtgcctggcgttgttgttgattagtcacaattgcttgacgggccgcccgctcagccgcttcaatcaccgtttgttcatcatggactaaccgctgataggtttgttcagcgggctttagttcctgtaatggtagctgcttggtacgacgttttaggtacgtcgtgacggtttgcgtcgttgtttgtcgcaacttgcgcgcttggggcgcttgctcagccggtaattgtggtagccacggctgagcaaacatgatcgttggcactgttggtacagcggtagtcagcgtctgatactgggccaccgcataaaagttatcttctgttgtaatcaccatcaagtaacgcgtttcggcgttcatgaactttttgacgcattcagaaccgacaatcaactcacgatgattatgcttgttttgaacatggtactcataacgaaccggcttatgacacaattcgcaatgatgccatgcttgtcggctttcattcgggttaacaacgtacggcagactcgccaaaagttgccactcatgactacagtcggtcaaccactgtgcatgatcttgtaaaatcaagttacgaacagtcgttttcaagaaatcactgtcagcctttaccgttacgtgtgcgcgtaataacgcactaatttgttggagcgtggtccgccgtcgagctcgttcacttaacagaaagaaacgattttcagcgggggttattaaagttgttgctgccggcaatgccgcccacccctttcagtaaaaataccgttctagcataccataactttcccattcagtgcgaacgttagttctaaaatctcggtcactctcattaacccaacggttactcccatcgcggttcgtttgttatcaagcctttattgattgcattcaaattcacccactttttgataattttattgatattacgattgttacaaagcagtcaaggtgctaaactatcttcgaatcaaaaaagattcactttaagggggattttgaaatgaaaaaattaacatcagtcgttgcaacacttgctttggcattaccattggctgccagcccgtttgctatgactaccacggctaatgccgccacggtaaccccaaaagccactacccatgcacttactaaagcgacccactttcccgccatcacaatgcacgcgaaggccgccacgactttgaatacaattcactttgccgccgatcgggcaatcgcctttgttagcccggccaaagcaaaactcagcactaaaaagacttacacggtaactaagacgattactttagcaaccggcaagcatacgtcggccacatattatctcattagtgaacacggtaaggccctcggctgggctaaagccaccacgatgattaaagggaacgccccgaccgctaaattaaaagcgaccaagaaaaccccgaagactaagttgacgattgctaagaagaccaccaaagtaaaatcaacgaagctaacgatcaagcaccctaaggcaagtatcaaaccaactaaaaaggtaacgactctcgccactaaaaaaacgttagcccaaccaacgaaaactaagaaaatggcaccaaaattaatcaaaaagaccgccaagcaaaacgctaaaaaggcgcccaaacttgcaaccaaaaagcatctcacggtcaaaaccactactaaacacacaccgtctaaattaacacctaaagcagctgctaaaatttgatcaaccactaaattgcttagcaacctgatcctgttaatgacggcgtctcaacgagccgttactactgatcgtgatgcacactaaaacgctccctatgaaagtcatctttcatggggagcgtttttaaatcatgccatcatcagtattaaccactgacaggccagcatttaattaatcaaacatcttcttagttgccttgagcaaggtctttggatccttatcgtaccgtggtgtcttgaccaagttatccattgggaccccagcaaagtgataagcggcaatctcaccagagcggaccgcactctgttccgtgaagatcatctggtatggttgttccgcaaattcacccgtaaaggctaggttcgttgagtgctttggtaagacttctggccgatcagacttagcccggttattaaagagtgcggaagcatatggcatgtataccggaatattgttcacaatactgtccaaaatttccttttccttgtccttaatattgcctggacccggatctactttggaaagttgaccaattaattcttgagccatttccttacccgtcatcttgatatacggcttgttaacaaactcaccttgacgccgtggatacaagaagtagccccacagaactgtttcgtttggttgctgtgtcgtaaagtgtggttggtggtgcaccacgatcgacatattaacatccttttggttcaacggcgtaattggcgtagttgataagaaggagttcaacgcattcccgggttcctgggtggtgatccgaacgatttcatttaagaataaatgattcttagtcgtcaacgtgaagctgacccattcgctagcattccgatcgttgaagaacttatctggcgtccctaagttatagaaccgctcagtagccttcttccacaaactagcactaacaccataatccatattttcaggagcaggcgtgttgtaatcacccatcgttgcagaatcggtaattgaaccgttagtgaagatcaccgctgtgtcctcatcaacttcaacttcttccgtttcgccagtctgcgcatcctcaatgactaagccagtcaccgtaatttcgtcttgcattggcgtgtctttaaattgccaatccttaacaatcttattatcaatgaaagtcacaccttgcccttgcaagtacttaattaatggcaaaatcatgctttcgaattgattgtaacgcgtccggttgacaccaactaagtgttcaatttgtgtaaattcataaatcatttgatgcatgtaacgccgcagttcttgagcagagctttgcgttctaaaggcaaaggttgtttcccacatataccagaaattcgtttggaacatatgcggatcatccttgaagtactcagcaatcgaaacgttgtcgagcttcgtttcttcactatctggcatcataatcaacttagtcagcaaagtccgatccttattattgaatcctaacttaccagcattaataatgcctttaccaccctgcatcaagcgggcaatatcatacgtccgatgtttcgcatcaaaatcacgcgtatcttcggccgccgtcatccccggttcagttaccgatggaatccggtccaataaatccattaagtcaacgtacgtccggtaattcagcatccgaccaccccgggcaacatacccagtcgtgttagccatcggatgattcttattccaatactcattggtaaaatcagtcgtggcaccaccatcattggcaccgtgcatatcaacaccatagaatgtgatgtccttaccatcccaatgaccctcttgaatcaagtagaccgccgcagccatatttgatagcccggcaccaatcataattgctttacttttaaccataaataacgcccccaaaataggtaattaggttctgataacgcttacaagtacattatacaacttggatagtgattgtctagtttgaactgaacttttttgttttcttgccgctttcttaatatttgcgctagtcaaccaatttctgcccatagcgtaacaccatttgatgacttttctccaattaaacacattgcctttaacaaatattacattttttcaagcggctcattcccaccacaagttctgccatttatgtatgcaaaaagcgagccttaacaaatgcagacggctcactttttattttgactaaccgttcaaattaacgaatagttcctgtatattgaaaatcatcggcagtgggatcttgtagaaaagccttcaaatcagtcatgttctcaataaccgctttgccggacttagccagcatcacattaaacgtgccatcagctaacgtttcactatagtaagcaacggggatatctaaaccatatgctgttccagtttcccaaatagttcccgtgtcaaagccatcaaccacggcgacaactaacttggcccgttttaaatggtccacattgtccgtaaataccgcgtttcgatcagcttcggtcgcatccggcgtcaaatcgatgccgtctagccgtggactgtaataagtcaattctaactcgtccattaatttttcgatcttagctagccgttctggttggccctcagtaaaccaaggtcctgctaaataaattgttggctcatcactcatcaaacgcgtactcatttgctcaatcctctttctcattcaatgtttattcattttaaccgtcaaccccatgaatttcaagcgtcgtttagctcgttttaggcaaacaaaaaggtcgggaattcccgacctaaatactcatttaacacttaattgacttaatccattaaaatcggccgttgttaaatcaacgttggcggctgccacattgtcccgtaaatgctcaatagaacttgttcctggaatcggtatgatattatcagaccgcttcaatagccaagccaaggcaatttgcgctgggctcacctgatacttttgggccatcgtgctgaggacactcccagcctgagccagttcacccgttgctaatgggaaccatggcagaaaagccatcttttgtgaggccgcgtagtcaacaacgtcatcatcaccgtgattggcgacattatagagattttcaatggcatcaatcttagcgacttgctgcgcctccttgatttgatcaacagttacttgactcagaccgatatgcttgattttaccttcatcctgaagctttttgagttcaccgacttgatccgcaatcgagtaatgagggtcaattcgatgtaagaatactaggtcttcatggtcaatccccagtgtcatcattgaaacttctacttgctgacgcagataccgtggctcaccaagtggcgtccacacattcggtccttgccgcgtttgaccgaccttatcagaaatgaagatctgatcacgattagcggcatccttcaagcccgccgctaagtaccggtcagcaaaccatggaccgtatgaatcagccgtatcaaagaaattaacgccatattccagtgctttcttaactaccttgaccccattttcaggatcagcgtatggtccccatgtcccaggacccgttaactgcatgacgccataacccatccggttaactttgaattgatcatcaaacgcgtaagtacccgcgttagctgcattaatcgttgtcatcaaatcgctccttatcgtttattaattatgttcagtttactcctatcgacccaagtgcggtcaaacattttgttcgttaaccttgggttgggttgtgcatgtatgaaccagccgcatctggcaagtcgtttaaggcttgcatatcggccacactaattgcgaagtccaattgcgtattcgcctcaatatgggctggattaacagccttgggcaatggcaagaccccattttgtaaaacgaagcgtaacgctaactgcgccacactgacgccgtatttatcagcataggcctgtacttgcggattatcgaggaccccgcccgtcgctaacggcgagtatgcttctacaagcatggcatgttcctcagaaaacttggtgatcttaggttccgtgaagcccaagtaatattgaatttgattgaccattggtggtatcgtcgcctggttaagaatattcttcaaatcccgaacagcaaagttagagacaccaatcgctttcgcccggccactttgataaatagcttccattgcctgccaaacatcgaggttagcttcatcgtaaactcgaccgacttgcccccatggccaaggtgcgtgtaccaaatagagatccacgtagtctaagcccaaatttttcagtgagcgatcgaaatcatttagtacaccttgatatgacttcgtttcggccggtaatttagtcgtcacaaagatttgctcacgcggaatgccagaatcacgaatcgcctggccaacgcttgcttcattttgataggccagtgcagtatcaatatgccgatatcccgctgctaaggccgcacgaacggcttgatacgttgcctcaccaccaggtatctgccaagttccgaatgcgactttgggaatgttgacaccatttgctagttgatacatcgttgttaacactgtcatcttatttttgctcctttactggttttgactgtcgttgctgagtgggatcacctgcaaggcttgccccgatgatcgccacgccgacgaccgttagaatttgaataaccgccatattactgtggcctccttaattgaatagagattagtgtaatcccttagagtaactctaaggcaaagataaagtttcaaaaaaagaacgaaattgacttgggccaatctcgttctgcattattgtgatattaattactcataaatcgttgcatgctggaaaatgatgctgccggataatgctagtaacgcggaaagaatgatagctaaccagagtactggtccccagcctaattgaccgcctaaccagccgaatagtacgggccccactgcagctaacaaatagcccgcggattgggccataccagataagtcagccgtttcaaacccattggtcgttttttgcgtaaagaagacgactgccaaactgaaggctgctccagagcctaatcctagtaagacgcaggacagtgctgccacccaaaaattcgttccggaaagtaagataccaccaattcccgcaataaaaccgacacctaccaccataatcattgcccaaacgccgcgccgatgaccagaagtcgctggcactaaatatgacatcggtaggccgctcaattgcatgaccgtaactaaattgccagccacaatcaaggagaagccgtgggcaacaaataccgttggtaaccaagtcagtaatgaatagtagactagtgcttgcaagccgaaaaaggccgtaacgacccacgctaacggccgccgccaaacactcccgtgagttgccgttgactgcccatcactcgcggtcatcgcaactgttggtgcgcgatgattgtatttcaagtttggcaaccagacaaccaaattaattagtccaatcaccgatagcaccgccatcgttagtggtaacgaccagtgtgccgccaacactcccgaaagtcccgttcccagtgaaccgactaatagcattgagagcgtgtattgactagttgcgactggaatcttcgtcggaaaattatctttaataatcgctggaatcaagacattgccaccgtccgcgccaatcccgactagtaacgtcccaatgaaaagggcagcaatcgttgggatgacccgcagataactcccaacggctagaaagatcaacatgacataaattgtcagttcgttgccaaatcgccgcccccaatgtgcaatcaatggggacataatggcaaacgtcaataatgggatcgtggtcagtaatcccgccatcgagctcggcaaacccagtgtccgtttcaaagaactgattaatcccggcatcattgtaattggtaaacgcatattcgttgccgctaacatcattccaagtgttaaatagcggctatgttgatgtgttgtggtcataagtagttgacatcttctttccaagattttagttcgataattgtcgaactaaaaagcaaaaaaactaaagcgttgctaagaaccccggtaaaaaccggtcaaaggtcgctaattgtaaggatagatacttcgtctgtgcctttcgtcgcgtattggtgagacccactaaccgcaaggtcttaaagtgataagagacggttgacttgctgatatttaattgcgcccccacttcgctgcaagtcatttcccgttgtgcttgatagagcacccggataatccgtaatcggttagcatcggccagtgctttgaaaatcgccactcgttgctgatcagcctgatcttgtttgcttatttcgatattcatgaaactaacaatacactgaattaacatcatgttcaaggacaagtaacaaaaaaggcagctagccaatttaatagactaactaccaaacacctaggaaactgcccgtttgccgttcttccaaatatcaggaactaaccacaaaattaaacctaggttaattaacaaaagtaacgccgtcataatgaataccgcgttgtaattgaaccaaccagccaccaaaccaccgagcaaggcgccgaacatattgccaatagcttgaaaagattgattatagctaaaaatcgttgaggtaagatgtactggcgtattcttagtcaaaaccgtttgaatctctggatatagtgcgccatcggaaatcccaatggcaaaccgcaaaataccgagggccacgacgctcgtaacaatgccttgtgggaaatacataatcaccgcaaaaatatagccaaataacaataccttaccagaaccgtgctgatcaccataacgtccaaggcgcggtgctgaaaagatgtttgaaatacccggtaaagctgcgataattccggccacaaccgtaatcgggccacggtaatgcatcaattcacgaacgtataaactaatgattggtgcaatcgaggcgtttccaaattggacgatggccgtcgaacataacatcacaataatcaagcgcggattttgaaacgctgctaaaggattgcgactgtcacctggttcacgatgatgtgcgactggtttgaagtgttcctgtacaaagaacagactcaacaaaaacgccaccattaataatccggccgtaataaaaaacgtgtttcgaatcgaaaacaattgggctagcaagcccccaatcactgggccaaacaattgaccactaacggcaccagtgatcaaagtgctcaacgcccgtccactatatttacgtggcgtttgggacgcgactaaggcttgggcattagaaataaagcccgcaaacacaccttgtagcgcgcgcaaggcaactagttgccagacattcgttacaaaacccattaaccccatcgcaactgccatccctagggacgcgcgcaatagcatgatcttacgaccttttttatcagcaatgatgccccacagtggtgccgaaattgctgaaatcgcgtaatcagctgcaaaagctaacccgctataaaatgtaatctgggccttcgtgaaatcacccaactgactaacaaataatgaaagaaatggcataatttcgctaaatgccattcccgcaacgaacgtacaaaaccataaaacaatcaaattacgatgccatggtccgcgttcacgttctgcgtcatccacgctcgtcatctccatatctaactgacactaattttcagtaagtattataccgttaattagcttatcatatttagcgaccaccagtgacaattatttcccgggaaattttttgtcatatttcctgaccagttagcccgtttagttgaccaagtagcaataagcactagtgtcaagccgcatttttcactacaataagcttatcaaaatcgctatttaaggggggaatcagcgatgcacgtacagttaaccatctctgaaacgattcatcaatgtttttcaagatcgctcgctcattaagctgccacttcaatcggtgtcacgtttttacactgccaataaacgactttattgtgaaacaaccaccggtgcttacctcgttcacagccacttacacactttaatggaccaactgccaccccaccaatttctacgtatttctagtagtgaaattgtgcgaatcgcctgtgttaaaaattttaccttaaccaaatggggtagctttcaagtcaacctaacaaccggcacaacaacatacgcatcacgacgctatacccaacaaattagaaaggcggcacaattatgaaaagactttggcacacccttttgattggcgccatcggaggcatcgttatcggctacttaatggccttggggttctcaaccttctttaataccacctatttatttccttctaatcccacttttgtcagccactggtcctcgcccttagccgccacccagctttcgacattattgtggattctgattggtgaagtttgggcattcagtagctggctattcgaaattgaaacgtggtcgattacgaaacaaaccattgctcattgtctgtgttcttacctagggatgaccccacttgcgattctctgtggctggtttccattaaacgttcgctggtttggcttctataccttggtttacaccggagcctatatcggtctatggttaattgaaatggcactcgcccgcatcaaagtcatccagctaaaccaacagcttaccaaccaccggtcataattcataccgattgttgatgtcaaaaacggcccaccgatttgattatcggtgggccgctcacttgttactgatgatttaatgatttaattattgaatttcgatttgaccgtcattcgcgctcggctgggtcttaggtaacgtaatcgttaagacaccgtcagcttgggatgccgtaattttatccgccgcaacgtttggtaacatatactgccgttgcaaggtgccagtatgacgctcattcatcacaatgttttggtcttgatcttcatgatccacaaagctatctttttgaaccttgatagacaacacattgtcacgataatccaacttcacatcttgcttatcaataccagggacatcaaccttcacttgatactgatcatcagtttcgttaatgtcggtcttcaatacttgatccatgttttctaatggtgcccagaaggagcgtgccatccgttcaaacggatccaacatgccgaaatcgttccgattcattaaagtattagccatactaacaatcccctttcaaaatttcacttggctattaatactggtcagtaattcaaatccttgtttgacctttcctgaccttcgatatatatactaacaccattttgtgggaatgcaacaatttagcactcatttaaccggagtgctaaattttaatttcacgaatccgtcgcattaggctaacaaagcgtctcagttccgcgtcagaatagtcatcagcaatggcttgtgctttagcagcaatggccgcgtccagttgcgtgtgtaaatcagcgactgcttcgcccagcgtcgtcaatcgcacgagaatttctttgttattggtcaaatcccgatatttcgtggccaatttcaatcgggataatttagtcaaaccgcgagaaatcgtcgcctgtgaaagttccgttggtgccggtagcgacttagctcgactggcaccacgccgtcccagatacgcaataattttaatatccgtcgtcgatagttgttttaatgccgcttgtagttgcggatcagtcgtttgttgcatggcccagcgtttttcttgatcatcaacgctatcctgcgtcaaaaattgatttaattccgtcatcaactgactaactaatggtgttgtcatttaaatatctcctttttaattcaagtgaataaatacttgcataccaatattattaagtctatactatcattttgtattcattagaatcaataaaaatatctggaggtcccactatgtttaaaattgcaatcatcttagggagtacccggtcacaggctaacggccgcgctttatttaaccatctaaaattaatcattgaccaattaccgactcattctacgattcactaccaatttttagatttggccaactatcagcttccccttttcgatgaacccgagccaccgatggcgaacccgcaccgcgagctacctgctaaccagcagcaatggctcaccgatatggctagtgcggacggttacattatcctgacacccgaatacaatcacgcgatgccagctggattgaaaaacgccttcgattttttggcattcgaaggcgcccgtaaaccggctaagattatctcatattctgacaatatgcgcggcggtcaatttggggcggccgcactagttccagttctccaacgattaggaatggtcgtcctccctaaaccaacgcccattggtaacgtaccacaaacccttcaaagtaacggtcactttatcgataacgcgcccctgagcaaacgctacgatcatgcacttcaccaagctttgaccgaaatcacctactataccacggttcttaccactacgccgtttccaaccgattaaattagtagcgttattgaatcaaacctgctacattatagttagcattattaagggggaattaacttatgaagatcgatattcatcgttccgcaacggaccgggtgattgccggtgtcattggtggaattgccgaacattttaactggaatactaacgttacccggctattatttgttgttttagcaattacacccatgttccctggtatcatcgcttacctgattctctggttattaatgaaggaccccatcaaggattaaccactattaacgaacagtcatcgactgctcgttttttattcgctaatatgcggccaaactttccgtagctagttcaatggcaacaagaacaccgcccgcaccccaatgtcgcggatcatagtgctctagttgtgctaaggtgtctgccgtatatagtaattgtccaaaggaaacttgccgaaacgccgaacaggcagctaaggccgaacattccatttctacgacttgacaaccctgctgacgagcagctttgactttagacacagtctcacggaagaaagcatccgttgtccacgttttgaccatctgccatggcaggcaagccttcgtcaatgttgtcccgagtacctgtataacctttggatcgagtggcacccaatcagctgctgctaaataatgaaaggacgtcccttcatcacgcaaagccaccgttgggattaataattgttcctctggtagtgctgttaatgcgccacaactaccaacggctatgacggtacgagcaccaaaatcaatcaacatctctaaatacattgtcgcagctggggaaccaaggggcgcttgcgctactgccaatttttgaccacgataaccgatttgataaacccagctaactttagtaatggtattaaattggcctaaacggtgaccatgataccgagtgacgaattgttgaaaataatcatcaccagaaaatatgtagagtagcttagctggaacagtaaagcggccatccacgtctggccctaccatagccgttggatttggatcatattgcaataacgttaacttatctgtcatcttaagttctccctatttaatttacccaacaattcgaggaaaaccagtcattttcagcgacaaactagccaaaatctgatatattattgcaactaacgcaataatttgtcatgaatttgtcaaatattttaatggcgttcacctagattgttcgtatataatattatttataataacgctaattaagaaaggatgtggcgaaattggcctatttaacacgcaataaacgtcgtgattttacagaacctcaccggtaataactttatttttaaggagcgaattgaatgataaaagatgacaatcagtcgttaacctctaatgaagagcaaaacgacacccagaaccctcccgatgcggataacttatggcagcttgatgaatcagccttagccgcaaagtacgccaccgatcctgagaatggattgagcactgctgaagctgccgaacgtttacaacataacggtcgcaacgaactggagaccaagcgtacgtctcggttcgttcaattcatcaagcagtttaataacagtattatctacattttagccgcagcagcggtcttaacgttcttcatgcaccactattccgattctatcgttattggactggttattattgccaatgccatcattggttatgtccaagaacgccaagctggcaacgcgctagaacggattcgtgaaatgctgatttccaaggatttcgtcatccgtgatggaaaaaaactggaaattgacgcccgcgaattagtcgttggtgacttagtcaacttagaagccggtgacgcggttcctgccgatatgcgcttgatttcagcggataactttaacgtccaagaatccgtgctgacaggggagactaatcccgtggagaaacaagaagaaccgattactgagaccacgccagctttggctgaccgtaagaacatggtttacgcgtcaaccgcggtgactagcggttcggccgtcggaatcgtaacggctaccgccgaagataccgaaatcggtcatatccagcagtctgttagcgacgtcaaacaaaccactaccccactgatgcgtaatctgaactcactgggggttggcttatccatcgccatcgtggtggcagccgtcctattattcctattaggaatggtcatggatacctatagtttgccaactttactaattgcggttattacgatggtcgttggttctatgccagaaggactgcccgctagtacctcggtggtcttagccatgggaacccggcagatgacgaagaaaaacgtcattgtcaagtcactacccgccgtggaaactttaggtgccgtagatatcgttaacaccgataagactgggacgttgacgaaaaatgaaatgacggtcactaaggtcgtgacgcctgagcatacgtttgatgtgacgggggtcggttatgatgataatggtggcgttaacttcgatggccatctcaagctcaatggcaacaaagtcgactggcaccaagataacgcgatggaatggctcgttaagattgccggccaaacgaccgacgccgagctacacttcgaaaacaatcgctgggaactgaccggtgaaccaaccgatggtgccttgacgacgctgtatcgtaaaatgactggtcatgatcctgaggttgaagaagttgactcgctaccattcgattccgccttccgtttttctgctcgcctggccgacttagatggtcaacgcttactaatggtcaagggctcacccgcgactgtcctgcgtttaactgaccaagctaaccaaacggcatactgggatgacgccatggacgacttaaccgccgatggtttgcgcgtggtggcgctggcttaccaagaagtcgatgatgacgtgactaccattgatgcacaagccattggtgggctgcatttagctggcttagtcggaatcattgacccgcctcgtgaagaagcggctaccgcgatcgccgaattacggcaagcgggcgtgcaagttaaaatgattacgggggaccaccctgatacggcgatggcaattgccaacaagttgaacttggccgccaatgtcaaagcgattactggtcctgaaatcgacgcgatggacgatcagcagttacaagcacacatcgatgattataacgtcttcgcacgggcaacaccgaataacaaattacggattgttcgtgcccaacaggccaataatcacgtcgtttcgatgactggtgatggggtcaacgacgccccggccctcaagcaagccgatattggggttgctatgggaatcaaggggaccgaagttgctaaggaatccgccgatatggtcctggccgatgatgactttgctgatatcgtcgccgccgttcgtgaagggcgccacgtcttcgataacattcgtaagacgattcgcttcttactcccaactagtttcgcggaaggcctcgttgtcatcattagtattttaatgggccacgaacttccgctgtacccgacgcaattactgtggatcaatatggtatccgcgctgaccatccagtttgcgttcatctttgagccacccgaggccggcatcatggcccggggtccccggaatgttaagtctgggttgttgtcaaaattagattactttgaaatcggctatgtctccttcctaatttctggattggggatcttcgcctatgactacttgaccgcgcttgggttaccaaacgtcgtcggtagtaccatgtcactgaacatcatcatctttggtaagattttctacctcttcaacttgcgaaatgaccaccccgtcatttccaagtacttcttccaaaataagatggcgttctacatcattggtatcctgattctcttacaactgggaatcatttacctaccattcatgcaatccgtcttccatacgactagcatcaacttctggtatggttggggcatcccgattatctgtgggatcgtcgtcttgattgtgaccgaggtcgggaagtctattcggttccgatggatgggaaaagatggcgtgattgattagtaattagttaataaatagaaatggctcaccaacctgttttagttggtgagccattttttagtatcgtgaaactgtttttgatgtggccgctattcaagacaaacgttctatgcttcgtttcctcagcatcgttctaaacctgtttgatatgactactattcaagacggcatgttagtagtttaggcgccctccaaagttctaaacctgtttgatatgactactattcaagactaatacgatccattgactccgctagtgacagttctaaacctgtttgatatgactactattcaagaccagctacttcatgctggctaaaagtatctggttctaaacctgtttgatatgactactattcaagacgattgactttatcgattacttcctgcaattgttctaaacctgtttgatatgactactattcaagactattctcgtttatcgcttttagacgtgttagttctaaacctgtttgatatgactactattcaagaccgttggagtttgtgccttaacttcttcaaggttctaaacctgtttgatatgactactattcaagacgtttggactggtttatcaagcaacaagttggttctaaacctgtttgatatgactactattcaagaccaaaaacccatgttcagtttcagtattgtagttctaaacctgtttgatatgactactattcaagacaagcgcgggatcacgtgcaacagcaccatcgttctaaacctgtttgatatgactactattcaagacataccaattggagcattaacataaatcatagttctaaacctgtttgatatgactactattcaagacagttactttaccgttcctagcacgagaatagttctaaacctgtttgatatgactactattcaagaccagcattttaacatcatttactcattaattcatatcacgccagtctactaaatcctcgtcaacataataataacaactatttttgaacttttccattcgatttatttctgagtattcgataacaatgacagttgccccaaatcatgcactagttgctcaaagctcgcccattgtttttgatttaagtaatggctgacattagtcaacaccagcttctgtttcaaacctagttcaacatgcgtttgcacaagtgcctccagtattgcccttgggtcattcataagcgccgttggaaagtgaataccggtaaacttcaatatttgttctaggctaggcgattcgtcaacatctagcggtaagtctagtaagaagctggcttccattacttgcgaaactactttacgattttcatctaagaccgctacttgccgatcatcagccattaacttgataatttgggtctgcactttctttagaaaaaggcggttcaaatcgactgataacatcaagtcaccataccagttgcattggctactgatcgtctgtaattcaaggtcgtcattgcttatacgtacgctgtcgattcgatctcgaaagccttggcacacttcggcatacatgttactatttcccaaatcgagaacgttgaccttaccagcatcgatcttgaatggtggaaatggataatatgttatattcatataacaatcgtcctttcagctgaattcaaaatatcattgctaggtgtaccttgaatatagtgcattgcctgatactgcttctcagtcactgtcatcgtttgcacttttccgcctttgggtgccagtggcgcaatccgcttttccacgaattcggccgctttcttatttacacaaacccggacgtaagttgagtattgcatcatcaaaaagccctcacgcactaaagctttgtgaaagtgccgatatgcacggcgttcttccgacgtatccatgggaacatcaaacatgactattaatcgcatcactcgatacctcatttggtaatttcacctcaatctttaattcttccgtttcaccgctaagatagtgtaagcacgcggcaacatactctgtaatcgcgtggctcacaattgtttggtgcccattaaacccaatctctaggtctaataacgacactagtccaatcttaatatccggtgtgaagtccttaaaccgttgttgactgacccattgatcaacaatcggccgaaaaggctccattaaatctgagccgaggttaaattcgttttcattgttctcatgatgaataccaatgcaggtcagatagccatttaaaacaatctctcgattcaccatggataacagcacggcgtatccgtagttgagtgcagcgttaattgggctaaaatctcgacggtagaactggtcaccaaataacaatgaaaaatatttattagccacaactgcctcccgattagtcacatcattcagttctaacttatccaactcatcaacaagtgtctgggtatcgccaccgacaaagtcaatgacttgaatctggttcaaaatcttactaccaacatttttcgtccatagcgttgcaattcgtgcttcgggccaagtcacctgttgtcgtaccaaatcagctgttcgccgtgtcggataataatcgttggtctcactgattggttccccctgatgatctgtaaaaataactttgacatgagcttccgtcagcgcacaaagcgctgcgctagtaatcacagcctgagttgttccgactaacagcaattgaatatcactgattggaaccgcatatttatcagaactcgtctgaactaatatccgattcattgaataagaaactttagcatgttgagtaataatcacgtttcgccatcccataataacagctccttgattaattatatttttcgtgctactattcacttgtatcaagttctaaaccttcttgatatgactactagcgtcaagatcaaacaaggcatttattgccaagtttcaccttttgagtccgtattcggaccactacatatgtaccaagatgtcatccttatcgggatggcatcttttttcgctataaatcttttaatgcaatttttcgctcgaacaaaccagttggtgattgatatataatttcagcgtcacccgttaacttaatgccaccaggaacctgtaacttaccaaaatctgttttcacacctagcacctttaaatcaccatacgaggcattcgcatgtaagccaataaacatattggtcaaaattccttgcttccctaaaaccagcttattcttaacaaattgatttttcgcttccagcagctcaatctgatcacgagcagaattaagtatcttcttgaacttgttcatctcgtaaagtggaaagtatcggttaacctgggcaagcgttgcgtcaaaaacagtcagtaaattctgatttaattgcacttcagactcattctgcttacctaaaaatgcgcgctgtaaagttaatggtaaatacagctcttgaatgttgtgataatacgtatcagtaccaagtgcgaagcggtgcgtttgacctttaattctatctcgaaccacctgttcaaaccgtaccttcggcaataacacttcatacgtcagcatcttcttgttgttggcatcaatgagcggttcaattactttcgtcaccgcttgcttgtttgtcattccttgttgttccaactgctcaatttgtgtcaccatagttgtaggtacacctacaacttggtactggacatcctttttagtcgatactttcacgatagccatgtaagccagcgtttttcccgtataaccaccataaatagctgtatcgaaggattgttttttccgaattaatcgcttgccattatcacttgccttcaagagagtttgatcaaacattgccccatagttttcggatacctcacgcgtcaccaataatcgcttgtaatcataaagcgtctcaaaatatttaatatcggttaacttatcccacaaaacttcaccagtatcgatatccgtaattggggtatcagtcttagctagttttcggataacattgaaacgtgttaggttaaccggctgtttagcgaacttaccgtagacgaagaatcgttccagcttcggatatcgcttcaacaaataggtgccaatgaaagcagttaaggctgcgtcaaatgcatgatggtagtcattgacctcacgaatcttcggaaaatcaaacgtttgtcgaaattgatgtgtcaagttcgctttaaccgacacaatagcggtggatggatattctgcattaatcagctcttcaactagtttgataacctgacgtgtctcaaccaactgccgattaataaaaccagtcgcgtacttgctgatttcatcaggacgcatcagtaagtggtcaagcttccgtttggtcatcagccccattcggtgcatctctttccacttagcacccatctttttcccaaacttttcactagcaaacgtatcatttttctcacgattgatgcgtgcatttgtcagtactcgattatctaatgagtcatctttcaccagagattgtggcaagatgtggtcgatatcatattctgacaatcgatcgatattaatcgcatcaccggtatacaaatcgcggccattttgtaggaaataaagtacgagccgcgtattgaaattagctttgttcttgattttctcttttaattcacgttggacttgatccctgacaatggcctgagctgttccctgataggctgcaacaatttgttttgaccgtgattgtgtccgccgaccagcaacgccaccaccacgagccgcttccacaaatatccagttaggtgtttgaccatgcatcgcatctttaatgtcagctaacaccaccatcacttcgcgaatagccttcttattttgcggtgacgtatataattcattgatggtatcttgaagatccgccgttgttaggttggcctggtttgccgatttaatttgattctcaatggcaggttggcttcgtaattgcatgaaattagcgtttgtctcccacaagccgtccatgattgaacgattattatcatctttgagacctgttaataattttcgtgataattgtccccagccacgatatcgtaattgacctagttgcttaagttgggccgctgtcagccaggaaatctctgtcagtttttgcttaaaaatcgtactatcttcaaaaatagttgaccataaaatgattttttcaatatcagcttgcttacgcacgtctgacatagcttcaggcaacacctgtttcaaatcatgatacgtggataacgaactattgaatactttcggatccgcaagccccgtaattcgtggcgcagtgggaaactctcccgctgcaactaaattgtcttgaatattcttagctgttactcgtttgtgttttttaaacacttggttatatagtcgttgtttttgccggggtgttaattgcccatcatcaactcgaatattattcagctcattgagcaccataaagcattggtaaatcaagctgcgtgcgggtagcacttcctcaccgatcaaatacgtatccgtcgtctgcatccgctgaatgaaagcggtcgccgaggccacccgatcgaccttatcatcaaaattccatggcgtgattggcccatcagccttacgtaccatccatgcaaaacctgcattggcagttgctgcctgcatttctttagtaatcagcggtccaacataataaggcacccggaaaccgacaagctcatcaagtttgtatggaaacttaccgcgtcgcttgatgaccggattttcttcacccaaccacgggtagtattccttctgattactaataatttgatctagctcattttgttgaacctgataaggaatagctccattctgctttgtccgcaatttaggcatgaattgttcagagtcaatagcttgcttaatttgagctgcccaactattcaaatctacatcggcgtcaacaaattttcccaaggccttttgaaacgcttcttgcgtcacctgtttacttttcacaccatcaatatattgatcgtaggttgcccgaatagcccgtccgcgcttggcgtctgactgagagcgaatatacgctttcaataacttcaaatcttcgccatggcgtttatacttctcaaccatactctgtgagaaccgtttaccttctggaataagctgtgcaaggttgacgctggcgtataaccgaattacctcatcaataatttgttggcccacttcgctaaaacggtcttcaatgccaggaagtttgtcttgattttcctctaaactaaaggcccaatcctttgcttcagtagcgtcgatgtccgttagagtcagcacatcaatcttggttttatttccaacgagggctttcgcaaattctgttaccactgccttttggcgcttcttttccgcagtagtcgcgccagttaaaactgctaatagtggcataattaatttttggcggtcactacgcgagatatcagttcgtaccaatgtttgtttgatgctgtcaagcaacgctacatcggttgtcaggttcaagttcagctccagatcagcctgactaaacaaatgattcaaagtttcaaagtgctgctgtaaatcaagtgtcccacttcgatacgctgtcgctgcatcattacgcaaaaaattgccgcgatatttgacaatatggtgaatcgctaggtaaatttcacgcacatcaaacttgcggtgctgagtcatcagcgcctcacgtaaatgataaatcgttggataatcatgatagaaatcctgatcactccgatcattaaacaacgttttttcaagaccgttataattaggatcacgaggtgaaatatccgaatatttgcgccgcgcaaagaaattgatatccaccttgctgattggttggtcaaagaattcgcgtagtaatcgtaaccgccatttcacccgtttcaaccgacgacgcgttgttcgaaatccccgccggtctgctgcggctgccccttctttaaataaccgtacaccaatcccagtctgccccttaatttttctgacatgaccacttgcatccacaaccgtccagccaaccgagttcgtaccaatatccaagcctacaccgtatggttctttcatttatacatcctccgataaattttagattatgcactcattatcgcgcagttggataatcatttgcaacaagcaaaagttaatcctagcaacgattgtaagcgcagtcttaattattttctttaatattaatgtattaaatatataatctttgtcgtgtcgccaaaattagcgacctattactatagacaaaaatacggtgatgacacaaagaatgttatcaccaccgtactttgaaataactataattttaaaaataataatgcatcaaggaaactcactgaccacgacctagcacgtcgccaaaaattccaacaacgccttattaaatgctgccgactgttccgccatcacgatatgaccagcttccggaatgaccacactctgtcctcgtagtgccatttgagcagtcactgccgcaaagtcgggattgaagaacggtgacttggcgcccgcaatgatcaagaacggtacggtcaattggcggatcacatcccgccaatcctgaaccgcgtggttaaccaacaatggaaacattaatttcgcatcgaacggtgcctgcgcttctactgccttgacgcgcgcatacgtcgcatcatcgatgtgcttaaacgtcgagtgtcccagcggcattctaaaatagtccggaatatcctgccattgaacctgtttgaacccatattgccagtgcggtgtattgatcatccgcggcgtttgatccacgtcgatcagggccttaattcctgtatcaccatacaatgacacgtacgcaaaccaagtcgcggcccccatcgaattaccgagtaaaattggttgttcgagttgtaatttttcaatcaattcatgcgcatccaccgcgcgacgactcatacgtaagcctttcgccgtgtgctcggataaaccttggcaccgcccatctaaattaatgacccggtagcccgcctgaatcagtaccgggatttgagcgcgccaaatatccttagcgccaccaaatcccgtcaaaataacgattggctgcccctggccttcatccgtataatctaactgaacgtgatctgacgtgataaaacgcatttcaccatcctcctttttgactattcattcaacatggtcattaaaatcttgtggcgttagcttctttaatttttctagccattggcgcgttttgtcatccagcccagcttcggaaagtgtattctgggcaatcactgtcgaatcaagcaactgagcaaccttttcccaatcaatccccgtcgctgtttgaatactggtttgtagctgtcgtacttgctcagtcgttatttggcccaattgtcgtgaatcaccagttaatgctaatagggcattgattgctaattgctctgataggcaggcctgccacgtcgctggggacagtgcctcagttaacgtaatccgctcacttaacggcacagctggcacttccttgttcagaaaagccgtccagcgcgccatttcctggtcaactaaggcatacccctgccacggtaactgccgattaaaggtctgtaacgtttgcttcgtcaatgccactactgaccacgttgtctgaccattgtcgctcaattctgcttgccctgcggctaaccactgtgccataaaacgttgcatcatctgtcgcatcaccggccgctgttttgccgcttgcgtcaggtggtaacgcacttgcaaaaattcgctaaccatttctggcataatcgcccgcttctcctgggcctgacgtcgttgctttaattgtcgtaaccgtttctgtttactgacttttgcataatgtccttgcttgaccatcgtgccaccacttttcctgataattatattgatacctaattttaacgcaataaaagcccaaaataaaagcacttaccatttactggcaagtactcttgattacaacgtttcttccttgttaccggcgtatttacggaaataaatcaatgtcatgatgaccagaaatacaacaccgactaaaattgagtagcgcgtttccggattaataaacatgaagaccagtgttaacgcgaggaaggccaacgttaaataatttgaatagggtgataatggcattttaaaaggatggttcgccatcttggctgcgttttgcttacggaacgcaatttgactcactagaataacaaaccacggtaccataccgggcaagacactcgaactgtaaaccatcacgaaaatctcgctagcatccttgaaaaacattggtaacacaacattcaagacgactccaattagaatcccggtcgcaatcgcaataacggaataaaatggtactccatgacgatttaataaagtcatcttccttggtaactggtgactttccgccaacgtgtaagtcattcgactcgcactataaattccagaatttgttcccgataaggaagccgtaataaccacgaagttgataatcgaagccgcagcggtaatcccaattttggcaaatgtctgtacaaacggtgaaccgatctggcttaacttatcccaggggtaaatgctgacaattacgaagatggcacccacgtaaaagattaaaatccgggcaaccgttgaacgaatcgctttaacgatcgtgctttgtggattttcagcttcaccagctgtgactccaatcaattcaatcccttgatacgacgccaacacaattgctagtgcgaagacaaagcccttcaccccaccagtgaagaaaccaccatgggtccacaggttactgattccaattggatgaccgccgttaccaataccaaaaataatcagacctaaaccggcaataatcatcagaataatcgtcaccactttaataagtgagaaccaggtttccagcgtcccaaacattttaaccgagataaggttggccgcacataagaatacaatggcaattaggcccggaatccaatctggcaagttcggccaccaataccggcagtagccgcctagtgcaatcatttcactcatcccaacaacgacgaactgaaaaatgttgctccaagccgtcaagtatccaaaaacggggtgaatatattcagaagcaaacttggcaaacgaaccggtattcggatcgacatacagcatctcacctagtgcccgcataatcaggtatagaaaggcccctgatacgatgtacgcaattagcactgacggcccggtccacttgatcgttgagctggatcccataaataggcccactccgatcgtgccgcccagtgcaatcatttgcatctggcccgtacttaattttctctgcataaattactctcttttcataaaatcaaagaactcacactatcacggctgacagtatatagcttttatcttagctaaaaaagtgcaccgacgcaaacggatttagtaacacatagtcagtatgtacttgctctaacgcggttcgagcatgcttcgtataaatttatcaacaaacagctttcagtcagaattatcggtataataagggtaattaaactagaaacgaggtttcgtcatggcaaattacattaaagaaattcgggctttggttggtcacaaaccaatcattttgaatacggccgctggtattttagtcaacgatcagcaacaaatcttgctgaaccttcgtaccgatacgcataactggagtttacccggtggctatctagaatacggtgagacgtatgccacggcctgcgtgcgggaatataaggaagatagtggcattgatgtcgaagttgttgatcgcatcggcatctttgataaaggcgagacggcctatcctaacggcgatgtagctcaaacaatcagtgcactctttcttgtaaaacccattggcggccacgttctgacccaagccactgatgaaacactcaaactcgactactttgacttcgacaacttgccgccattgttaaatcaacaaaatgcagatatgattcacgccgcccaggaatatttacagacccattcggcaaccaaataacctaaccaaaaatcgtcattccacccatgtaagaatatgcgtaaccaatccggactttccgtctccggtgttgtttggggatgctccggatcggcaataatcgcgatacgagcaattgccgtcagcggcacctgttggatttcaaacgtttcgtaattgtaaagcgctaagcaacccactaattgtgcatcatcctcatccttagtcgtggtgctaaataattgaatcggataaataacctggtcgaccatccctacagtcggctggtaatagtgcatggtcgtcaactcatgatacgtgactgcatgaatcaacgcctgtaacaaggtctcgttgacaccttccgtactacccgcaactagctgaacatgacgctgataattcgccagcgcatgatacgtctgatcacctaacgtctgccgcaatttttctaccgttatcgttgtcacacttggttctaggcgttgaccaccctgataatttggtaatgcggagactaacaaggctgccaactcttgctgcgtaaacgtcgcgttggtgcgactaggtgttactggatggtaaggaactagcggttgtgaggagaagtgcaatgctaatttcagtgctggttgcacgcgtggatcaccaaacggcgcccagctgaccatgaagccggcctgcatatgtgcactaacctggccaactcggtaaataaccgcgggttgcgcagcatcatcgaccaagttatcattcagccccgtcttggtttgagcactgataccaactacataaaagctactagcgttcgttaagaccgctgctgaaatgtgttcattttgccaccgctgaaccacgtcggccttcgccgtcacttgacaagtaatgaggctgtccggcggtacttgtgaccaatcaggcgttaatagataacgtttggtaacgtgtaattcatcagcgggcgtcaaccatggcgataacggaacctgctgatacttaatcgggtgaccattgcacatcatgacaattgttcctaacggtgtctgtaacgaatgcgttggcactgcccctaaatttgtcctcgatttagccaatcgttggcggatttgcaacgcctcaatcggactcgggactgcagtagtccgccatagcatcaattcaagatgctgtttttgctgatctaataccgtcacgatgccgtacaatcgttgtccctgatccatcagtgccgcgtacggctgattctgataccgggcaatgtagcctaacttagcatgttgcaacgtccacactgagatggcattatcatcgtattgattgccactttctcgctggagcaacaccgccatacccactctgagcgtcgttaacgttgccacaatatcatcgacataccgttcgccaacgaccgtgactgtatccaatgcgacggctgcatcgcctgttgaattttgttcagttacttgaacaactgtggtcactggaattatttcaatgtcagctgtttctggttcgtgggcgcgaactaacagttcttgcccctgattaatcacagcgataacccgataggtctgcttcttcaacgtcattacgctcatgccagcttcaattcgttccatagcggtcacccccttaacaataactttattccattatacgaaagcgttgccagtattaacagctttacgaattgttttacacgtcagcttacaatatcttggattagttatctagttgccaacaccatttcagatgtttcacgtgaaacattcattagttttgcggctgcacattaaaaacgtggttatcctacaattcagaataaccacgcccgattttatcaatttgctagtcaatgctatctacgccacacaagcccgcataaacgccgcaaacaaccgcgcctgcacggagtttacttgttgcatcatttctggatgccactggacacccaactgtagaccaccagctgtcgcctcaattgcttcaacaacctgatccgcactttgggccaccacctgaaagcccgttgccacctgtttcacggcctgatgatgaaatgaattgaccgtgattgcgtcactagtggtgcctaaatattcagctaaggtcgtacctggtacgaccttcacgtgatgcatgccgtaagcggccaattgtccttgcatatgttttaaggtaccctgaccagctggtagttcactcatatcctgataaagattgccaccatagcacacgtttaagatttgtaagccccgacagataccgagcaccggtttaccaacggcgtgggtggcacgaatcagcgcaatttcatactgatcccgttccggatctaccccacccaatttaggctggggttcctccccatacgtcaatggggccacatctgcaccaccacaaagtagtagaccatcgatcattccaacgtatcgttcaatcgtcgttgcgtcggtcgttaccggtaataccaatggcacaccgccattatccgttactgatttcaaataatcacgattcacataatcacggacccgccccgggaacatctggctgttcactgtcacaacgcctggtgcgattccaattatcggtttaaccattctgtcgccctctctcaaaaaaatcccacggtaacatgcgtattaccaatgggattatcatttactttttacatctaattgtcaatgactaagctcacgatattcgagctcggttggtttgacgataattcccgtcaaccagacggcgatgctcagcccaaccaatactaatagcgtcgtgccaccaatgaaatcaatggcctgtaactgataataggcgacaatccccacaacccaccagcaaaagttcaaccagtatggtaacgtagcgtgccgcacaaagtacgtgacgaagataatagcatatagcggtgtgaagaccgaaccaatcaaatacaggaagttctgataatacgtcatggcaaccgtcagcgcaatcaatagcccaactaccgtcacaccaacggctaatcgattaacatggcggctaccggtcagattagccaaactcgtggcggccgaataagtatctaaaaatgtcgtcgtcaccgttgagaaaacgataatcagcaatgcaaccaatcctaaaccggaccgcgtcagcaatgccgtgatatcagtttgccctgtccgtaacacaactaatagccccgtcacaaacatcactaaactgcctaacatatagccacctgcgctgactagtgcgactggtaaaggacgatcaacacgctgggtataatcaccaattagtggcaaccatgagagtgccatcgtaacgttcaattccactgcttgcccaaacgtcatactagtcgttgataccgactgactagttgtcggtgccataaataccattacgagcattaacaccgtcccgagcaccaacaagcccacaacggcattgttgattttgaacagtaactgactacccatgagcaaccacgcaataatcaaaatcgccacgatggttgccattaatagcggacttcgaaagccaaatagctttccactaatactgttcatggctaactgagcattgacgatcatcaccgccgtccagccaacgagttgcaaggcgttgagtcctgacgctagtaacactccgccgcgaccaaaagccagttgggctgacgctaacgcggactggtgtaatttagcccccaaatagccggctggaaccaagaacaggccacagccgatcatgtgccccaatacaatcgcagccaatccgcgtgtcagccccagtggtgccatcagcgtacctgttaagatttcggcaattgagatagccgcaccgagccacagtaaaaattggctccgaaaaatcccgtcatgtttcatcagtgcacctccgtagccgttagcatcgccttgaccgtggcggccatatcgggactacgcgttaacattgagatcaccgcagcgccagccgcaccagtagccgcaatagctggcaattgcgcgacagtaattccgccaatggcgacaacgggacaggttgcagtcacgactaattgtcgcaaccccgtcagaccgactactggatccgcatcggccttagatgtcgttggaaagatgggaccactaccaagataagcaatgccttccaattggttagcaatctgcacttcagctaaggttgaacaagacaaaccgacaaacatttgattagcgacccgttgaataacttgtgtcacccggtcatccttttgaccaacgtgaaccccatctgcttgcagtgcgagtgccagctcgacatcatcatcgacgataaagggaacgtgcgcttgcgcacaacgtgcccgcagctgttgccccaatgcaaaacgctcagccgtagtcaactggctattacctttatctcggtattggaatgccgtgatgcccgcatccaaggccgtttggacgaccacatttagatcctgtcccggcacgtcttgtgtcccgcacacaaaataagcacgtaattgtgtgagttcaaatttaagcgtcatgaacgatcacctgctcacttggggttgcccaatgattcagcgggccatgaccatgcccgacctggataccatcctgaatcgtcccagcaacgtacgccttagccgttttaatggccgcagccattgaccgtccttttgctaattcggcggtaatacatgccgatagggtatctcccgtgccgtgggttcgcaccgtatcaatccgtggggccgaaagccaaaaggcggtcccgtcagccaacagtacgaagtcattagctaaatcggaattatcaccatgcccacctttaataatgacattgtcagcacctaacccctgtagcgcatgtccagctgtaaccatcgcttgattactagtgattgcctgaccaattaattgttctgcttccggtaaattcggcgtcacaacagtcgctaacgggagcagttcgtcgcgaaccgttttaatcgcatccgcggctaataacgccgccccgcctttcgcaatcatgactggatcaactgtcagcggcccaaaatcaactcgtttcaagttctcaacgacggcatggacgtgttcagcatccgcaagcatccccgttttacaagcgcgaatgtctaagtcagctgctaacgaagcaaattgttcgtcaatgatcttcgtcggcattgccataaaatcttggacccccaatgtattttgagctgtcacggcaacgactaccgcggtaccaaaaacgtgacgtgcctgcatcgtttttaaatcggccatgacaccggcaccgccaccactgtccgtaccagcaatcgttgccacttgtggaaattcattcatcaaatctcgcgacccttcattatatttaatcaactttagcaattgtttgaatttctgacactgtcactaagctcagccggtcaatcaaatcaatggcaaatgtggcgggacgatcggccgtcagctgactggcgacaagttcccccgctcccgctaagactaagcaagccacttgcgccgcctggtaaacgtcggttggactaacggctgtaaaagccgcgacgatactagaaagtaaatcgcccgagcccacgtgacgttggaagagcggggtaccattagcgactttaactacgcgctgaccatccgtaataacatcagtaggtcccgacaatatgacacagcattggaattgctgtgcacaagcttgagcaatttcaaccaggtcgccctgaccgctccccgcatcaatgcccttcgcttgccaatccatgccagccaatgccgcaatttcaccagcattgccccgaataacatcgacttgaaaatcagatagtaatgctagcgcgacttcttttcgataagggaccgccccgacggcaaccggatcaagaacgactggcttatgatactgattagcaagcttaccaaccacccgcatttgatcaatctgggtggtggtcagggttcctaaattaatgcaaacagccccggcaatttggaccatcgtctccgcttcttggacttcagctgacataattggcgaggcccctaacgcgtttagcccattggcaacgtcttgaaccgtaacaaaattggcaatgttaaaaacaatcggattgtgatcccgtaaagtattcaataattgtaattccatagcaattctcctcctcattgaccgtcacaccaatcaaaaacgaccaccaatcaacatgcattgatccagtggccgctaacattagctgtgacactttcctacgcaagtttgagcttacaggttcagagggatcggcacttacagcaccatctcagcccatttttggacacccctagtgtttaaaaatattcaattactaaccttagtctaacgattgtaaccgctaacgtcaatctttccgttaaccgaatcaccctcattgctacttaattaattaggcattaaagtttaaattcaccgccgcgaccggttataataaaaagcaaatatgcctttaagaaaagagtgattgaagatgcaagcacttgttgtgccagatccatccgctcaaactatggaacagcttcaatggcaagaacggcccatgcccaacctcgggccaactgaggtgttgatcaagacccaagcagtcgggctcaatccggtagattttaaattagttgcggcgggtaacgccgcctggcaatatccacacacactaggactagacacagctggaatcgtggaggcggttggcgctgaggtcactaattttcggcctggcgaacgagtttgtgggcacgctaatctcgccaataatgggacgtttgccgaatacgtgagtttaccagcagccgtgctagctaagattccaacgactgtgagctttgaagcagccgccgctagtctctgcgctggattgacggcttatcaggccctcctgcgcaaagcctatttaaatgccgcgcaaactgtgctgatccatgcaggtgcgggcggtgtaggcagtatggctattcaactcgctaaggctgctggcaagaccgtcttcacgaccgtttcaaaggccaagcaagccttcgtggcaccgctgcatcccgatgcccaaatcgattaccatcatgaagatgtgaccacacgcattcaagacctaacgcagcagcacggtgttgatctgatcattaataccattggtcatgctgatgcggacttaccgcgcttagcttacaatggccagcttgtctgtgtattagcaactccggaccactttccaagtaatcaagttgtaactatcagtaaattggacctcggtggtgcccaccgtagcggtaacccagcgcaagttgccgatcttgggaaaatgaccgccgccttattagctttggtccaagctggcaaggtcgacccactaattactcaggtcttgcaccgtgaccaacttgtaactggtttgcaacaactccaagctggtcaagtcgttggtaaactcgtcgtgacttttgacgcctgttgatctaaaaatgaagatacgaaaaacgcagctcaagggcggccttgaactgcgctttttggggtgtcaggcgataatcgcaacatgtgcgtatcggctggggttacgattatcatcgggtgggcgaatgaaccatgatcaccgccgttcagccgcccatctccgattaatcccgacaccactatcattaatttgattaggcctaggcgaaagtggccaattgtgccttggtcaacgtatcattcatccgaccactacggaaaccacctaaatcaagggtaacgtagcggaatccaagtgattgtaattgacggttaacgcggtcgttaaagactaagaaatcaccaattcgtgcttctggtaattcgatccgcgcaatatcattgtggaaacgaacccggaccgttggaaaacctaaactacgcaaatatttttcggcggccattacttgagcaatattgtcatgtgtcaacgtcgtcccgtatgggaaccgtgaagatacagagcatgacgccactttattccagttcgtcaaaccgagttcttgtgccaaggcccgaacgtcagtcttgaagaaatcagcttcttgtaacaagctccgggcccccgcttcactacgggccttcaaaccaggacgataatcattttcatcattcttgatcataccgtctaagacagcggcactaccgttattagccgcaatgtcattcaaccggctgtagaacatcttcttcgcatagtaccagctatcaggcgtgttgttcttgatgtggtcatcgctcaagtagtctagcgtggttccttgaacgttagcacctagttcttcggctaaactcatcgctttatcgaattcttcatccgtaaataattcagagttcgcaaccacagcggtcacattgtcacggcctaaaacatcgaaggccaacttcaaaactaaggtactgtcgatcccaccagaaaaggccacggtgacccgttgtaaatcctttaatgctgctactaacgttgctttttttgttgctaatgttgccataataaaacccttcttctatttaatttaattaattccaaaaaatccatgcataaaccaagcggcaattgctgccccgacaaagggcgcaattcctggcacaatgataccgtattgccaatcactatcggctttattggcaattggtaagatggcgtgggcaatccggggtcccatatctcgagctaagttcattgcgaacccggttggaccaccaagtcccatcccaatggcccatacaagtaggccaacgccaattggcacgattcccggcgttttaatctcagaaatcgctaaaatacccgaaataaaaataaatgtatcaaataattccacaaagaaattccgcggtaagttacgaacggctggtgccgtacagaataagttccgaattgtaatgggtgaaatctcatctgttgaggctttaaaatgatcagcatacatgatccaaacgatcactgagcccacgaccccaccaagcacttccgcaacggaatacggaataaataaagaccatgcgatatttcctaatagacactgcgccaaaaccattgccgggttaatgcaaacattgccaaaaatgaataaggcaacgctaatcccaaaaccccaagttgtaatggcaaaaatatgaccggaaccccgatacttggttccctttaatacggaactacaatgaacacccaccccaaaaataatcattagggctgtgcccataaattcagcaatcaactgatgtaccaaaaaattacgcctcctcatctaattgatctaccgccactaaggctgcctggtagaccgttctaaacggaatatgaaattgctgcgccagctgggcacaatccgcatattccggcatcttcttctcaatatcttgatatgtcgccactttaacttgaacgtcaccgtacggcgttgcgaccgtcaggaagtgccgttgcataatagtacgttgccacgtctggtaacgtacaccaatcgtcgtcgtttcttgtaaaatcaacttagtcagtaagtccttatcgttaacgtttcccaaaaccgttaactttgtcgccggccgatctttcttcatctgaatgggcgtgaaaaacacatcgtatgcgcccgccgttaataactggttcatcacgtaccccagtccttcacccgtctgatcatccagattagcttcaatcattaagacagcatcagccgtccggttaacgatttgctgacttagttttttttttcgaataatacggctcgcagtgcattgaaaccacccgtgtcccgtttaccaaacccataaccaactctagttggcacggcattttccggtaacggtccgaattcacgtacgagcgtcttgaccaagcccatcccagtgggggtaatcaattcagtatgcacatccaaccgttgttgaatcggaatggcactaccaactcgcatctgcatcacggctggtacgggaactggcatctgaccatgggcaacgttaataaaaccactaccatcacttaacggtgaagccatgatggtatcaatctgcatcaattccaacccaatacagcagcccacaatatcaacaatcgaatccaacgcgcccacttcatggaaatgaacttcagctagtggcatgtgatgaaccgctgcttccgcttgcgcaatttccataaagatcgctttcgcgtggtgtttcacggtatctgataagtcactgccgtcaattaacgcctcaatatcagctaaatgacgcgcttcatgatcatgatgatgcccagcttcatgctgatgatggtgatgttccacaaaaccatggtccttaccacccgcaacctgaacatcaaagctcgtgccatagatgctactctgggcttcccgttgctgcgttaattcataaccgtgcacgtgtaacttagccaattcggtttttaattgctcaaaatcaagtcctaaatcgagtaacgcgcccagaaacatatcaccgctaatccccgaaaaagcgtctaaataaagtgtttgcatttatcttctccttgttcagttaactgaatcttacatttgattgatcatactagctgagtaagcggcaccaaagccgttatcaatgttgacaacggtaatccccgacgcacagctattgagcatggtcaatagcgcggtcataccttgaaaactagtaccataaccaacgctggtcggcactgcaatcacgggcttatcaactagtccaccaacgacactggccagcgcaccttccatgcccgcaatcacaatgaccacccgggcaccacgaatcacatccaacttggcaaacagtcggtggattcccgcaacacccacgtcatagactcgttcaacacgattgccaaaagtttccgcggttactgctgcttcttcagcaaccggttgatcggaggtccccgccgtcaccacagcaatgtaccctggtgttttcggtgcgggttgttccccgaccgtcatacactgcgcagtggcatgatagacagccgttggtaacgctggttggagtgccgcgaatttttctgcggataaccgggtcgttaaaatcggcaacgtctgttgggacaaggcttgcacgatacccacaatttgggttgccgtcttaccagcaccgtagatgacctcaggaaagccattgcggcgttgacgatctaaatcgacattggcaaaacctaatgccgctgttttgcccgcttctaactgttgggcagccgccgtcggacttaattgccctgccgccacttgttgtaatatttctgctgtggttgccatactacttcacaataacgcctaaaccatcaggaataaccgtcactttagcggcttgaccctcgcgtgcgtaggccttttccatggcttcatctaacgtcttggctagttccatatgcatattcgtaatcaaatcaggatcaacgaggtctgacacaaaaatcacgtgatgatgaactaagattcgagcaaagatttgggccgtccattggtcaggaatagttttaagccgtggcgtgttgattgcttggtccaggaattccttaggatcatcaacgtcagctaagttgtgataaaacccttcaccaccgtgaccatcacgagcaccggcaaccataataatcgtgccgccttctttgtttgttgcttcagcagcggtcattcctttaacggcctgataaatattttgatcaagcggataaccaccattcgtcgaaatcgcaatgtcacaatcaatggctggtacactagaaagttctttgacaaagtcacagcccactttatgggcggcttccatgtcaccggcaaatgacccaatgatttttttatcttcgtctaaaacaacattgataataaaggcaagtttagcggtccgagcagcgtacaccatatccttatgaatcggattatgcattaaattaccggtccgggccttcggtgagttaataaattcgccggaatggttcgccataatcgtcttgtatgaagcaatcccaggtaaaacggacttccgaccacctgaaaaaccagcaaagaaatgtgattcgataaagccttcggagattagcaaatccgcttcagcagcgaccttattaataatgcaatcgccgccagatggtaattggccaatcttgaccatactactgtcatcggttgagacatgcatcacgatttcttcgttattgacgatgtcttcaccatacttattcaccaattcttcgtgggttgatggccgatggaaaccagtagctacgagaatccgaatccgtgcatcgggcgccactgaccgtaaccgccgcaataggatcggggtgataatatgtgaaggaactggccgcgtgtgatcggaactaataatcacaatattgtgcttcccacgagcaagttcctccagcttatcggagccgattggattatccagcgacttctcgaccgtttcctgttctgataatttgttatgatatgttgcagcttgcgacactaacttaccggcgtaattttcatcatcaatctgagccgtaattgtgcgcttgtcatatggtaaatcaattgcaaccatgacttttagccatcctctttctctaaaaactaatttttacatgcacgttttgttatactagaagacggataacttgtccgttacattttaagttttcaaaaatagttaacaaatgtatactttaaatgcgattgtcacaatcatgaaaaccgctatgcttaagtagcgttatcgtcgtgattactgttgagaatcgctatttttactgacctcaaccttaaaaattattcacgaaagaactgaaaaactaagatggtattaactgatattgaatatttactaagttatttggaagcccatcacgtgccgacaatcaaaaaaaagcggcatacttacctgacctatcatggtttagccgaacactatacgtacgtcttaaaggacggcatcatcaaaaacagcattattttacaagacggtcgcgaatataatttatcttatattgccaagcccgacgtgatctccctgctgcgtgatgaagtttctcgttctacggatcaaccgtttaacgtccgtattgagtccgaatatgccactttttaccaggtcaaccgggtcgctttttggaagtacgtcaacagcacgcctgaactgcaaaactacgttaaaaattattaccgtaaaaagttgtccgaaaacattcttcgactgcaacggatggtcatgaacggtaaaaaaggagccatttgtgcctttatctatagtcttgttgatttgttcggacgaaaagttaacgaagggattctgattgactttgtggtcaccaatgacgacatcgccggtttctgtggtattagctcccggagcagtgtcaaccggatgctcaaggaattacgaacagacggcgtcattacggtcaaaaatcacaaatttattattcaagatgttagttacctcttagatcaaattgcaaattagtgaggtgctcatccgtgcatattccggataattatttaagtcccgcaacttgcggaacgttggtcaccgcgatggctcccgtctggaccgtcgccgttttaaaagttaaagttcaaatcaaaaaacatcatgaaaccctgccaatgctcggcatcgccgcttcattggcttttttaattatgatgttcaacttgccgattccaggtgggaccacggctcacgctgtcgggggaaccctgttagctgtcttgattggcccatgggcggcgtgtcttgcgctgaccgtgacgctactactacaagccttattattcggtgatggcggtatcctagcctttggcgctaacgcgttgaatatggcggtcattatgccgtttgtcggctacgcctgctatcgcctaggtcaaaaatggcaccatgaaaagttggggctcgcaattggtgcttacttaggcattaatatggcggcgctagttgctggtatcgagctcgggttacaacccatactggctcatacggcaagtggtgcgccgctctactgcccatacggcctcaacattacgatacccgcaatgttgacggctcacttattagtcgccggctgggtcgaagtcgtcttcacactgcttgtctttcaatttgtaaaacgagtcgcaccgactaacctctatcagacacccactcggcgcaatcagcggccgtggatcgcactgctactcggattagcggtgttatcaccattaggcttgttggctagcaatacggcttggggcgaatggagcccccaagaattacagcaacggctagcgcaacaacatatcagtactcacgcgcctcaaggaatggtccacgggttccattttcaggccctgttcagtgattacgccatcgcgggcttaccggtcagtgtgggttatattttatcggccattaccgctgttttgattttcttacttttgattcgaggtcttcaacatgaaaccgacacgtcccaacactgatattccagcttggctgcaaactacgaccaccacgccaacacctgctattaaagcgaaattttggcaacgtaatcagcgtcacctacgccaattactcagtcgactagcacagccagcgccagtcacggcaacgtctcattggcgcgttgcaccgcaattcaaattaattcagctcctgttgctcgtcattttaattgctttaagtaataatctcattctgttatggggcctagcactattagttgggtgccaattattatggttacctccacgccaactgcgccgttttatgggaagctggctaatcagtgttgggatggccatgctgttcgtattaccgagctactggttagccggtcccaccacgctattattctttggccttaaaaccagtctaatgctggcaaacgctcaatattaccgtctaaccacgccgtttcaagatttattggctggcttgaaggcactccattgccctgatctattaattatgactttggccattgccatcacgtacttacgaatgctcggccaacatctattgctgacgatggaagcactagaattgcggacggtcgccccaacggctcatccataccgtttaatcggcgcattatttggtaatttatatcttaaaagttacacttatgcgctagaactatacgctgccatggaagcacgcgggttcaatggtcattacgcgcgctcaaccgggcgtcgtacccattggcgcgattatcttgccctgagcccagcgattattgtctggatattatttattttttggaggcattaacgtggtattgattaaattggtgaatatttgctatgattatcctgatacgtgtggcttgaaggacctcagcttaacggtcaactcaggcgactttgtctgtctaatggggcccaatggatctggtaaatcgacccttttacgactattgagtggattagctagtccaactagtggcacttatcagtttcacgatcagccgattacgaccacttatctcgctgatgcccaaaatcgacaacaacttcatcagcggatcggcatggtctttcaaaatactgatgttcaactattcaacacgtcggtcactgaggaagtcgctttcggtccccgacaactcggtttatcagcagccatggttgcgcaacgcgtcgccgactgcttacaattaacggactgtgctaacttagcagaccgggtcccttaccaactttcaggtggtgaaaagaagcgcgtggcactagccagcgttctcgccttgaaccctgaaattttattgttagatgaaccgctgaacggcttaacaattgccgctcagcagcaaatgctaaccctactgcaacggctacaagctgccggcaaaactatcatcatggcaagccataactaccagcaagtccaagccgttggtgaacgtttcattatttttaacagtacccaccaagtcgacgctgacctaacgcgcgctgatcttgatcagcaacccgctcggcaagcgcaattgatgactttataattaagaggagttgagaagagatgcttaatccaaatactgagatccatcgtggttggaaccggcgcgttgtgaccggtaaaactttagctgaatgtgatgaacgtttagtgaagtatttaaacgaccaagattatggttctggtgaattcgttgttttacacgaaaatgacggtagcaacgaaaacactggctatgatttacctgatggcgataactgctacattagtttcttgatttataacagccgactttaagttggtggtgacaaaaatgcttactggtggatgatcgccagtaagcattttttgttaaactcacaaactattctgattttaagcccaactcggctaacatgattcgtgcaaacgccactaagtttggacgtgaccatcgtataacctgttcgtcctgttgaccagcataggctgctaacgcctgcctgatcaacggatgccactgtgttggcagctgttgtaacccacattcacccccggcctgcttagaaataattaactgatcttgctggtaagcgcgaactcgacaaaggtttaataccgtatacattggtaactgaacgatcgccgtttcagcattcgcgatatcagacttgatactgtcccaataggccgtcgcaggaacggggccaaagaccgttgtaatagctggcccaagtaagacttgtcccgctgcttggagaatcgttaagtgggcagcaagatcaggatccgtgccgtgcatcgcttttaggtaggctagcggtgtccgttgataatcctcataatggtattttgaaaaatgaaaatcgaatgggcaaggatgcacaaaatgctgggttgcactcagtaacagcacatgaaactctaatcccttgtgtggcgctaatggccacaattgcgttatggtagctgtcattaactgccgtttttcagctaatgttaacgaacgccgaacaacgatcagatagtctaaatcgctcacctgttcgttatatgagcctaaaacataggatccatgcaggtaaataccaacaaggtttgtttttaaaattgcggtggtcgtttgttgaatggcttgtaataaccgtggtgttgatgtcatcatcaaaccactcccctctaagtcttgagcttagcgatagccacgaagatgcttaatcaaccacgcttcgtcgaaaagcttttcccaatcacgttcgatagaaatattgccagtttgtttgataaatgagcgatgctgataagtttctaataacatattttctcccgtgaagatgtgttacggttcgtgcgtatcatatcatacaacgcactaaagaaaataacggactgccaagtgccagttgtttcacgtgaaacatcctacttcaaataaacacgagtcagcgcttcgcacaatttttcattacactcttgagcgttatgaatggtctgcaaaacttgctgctcgtcaccttgtggctgtgttaacaccacccacacgtcaacgttcgcttgatgaacatcatcactcaaatgtgtcggcaaagccgttgaactttgcggtgtgggtagattaatttgttgtaacgttaaaccaagttgatcaattgccttaattagcgccgccactggtgcttgcattggttctgccaacgtctcacttaactgtcgaaagccaccgctatctcctagtgtccagttgccactaaagccaaccgcgtcaatagggtcatccgtccgacgataagtcacatatcgaactggcatcggtccctgagccaagagtccgggcatcgtttccaagttcgcattgatctcagctaaaggtaattttcggaaatcatggccgactagttcgtaacgaccaccaaccaattgataatcaactagtcccatcgccttaatcaggccagcttgcactttgaaaccatcgtaaccaacttttaacgcatcgaacacatcaatcgcttgcgcgtcggttcgaaaaccaaagtttggccccgccccttctggataaacgagattacattgatactgaaacgacatgccgattacacctaagtcttgattggcccgcttcgcttcatcactaaattcaccgaaataaccggctacaactctaaagctcatgtttagccctccttaatcttgtcaccgcaatattgaatccgtttacattattgatgtcattataatttttattcgcgcataatgaaagtaattaatgcttgcagccgttattaaaagccacgcaatcaatgccacgcgacactatattaatcctcggtttatttacgaacatcgttttctgtttgactaaatttatagttgaacaatatttttccagctcttgacaactgattttcaaaagcggtatactcacttcaacaaaatatcgtccttataaaccaatgaggtggagatcaagattatcgtgcccgcacagagagtcatcgttgctgagagtatggccgaacgcaggtaattaaatggaccaccgagggctttgccgaaattaacgtcagttgagagtacggaaagacgtgcgacatacgtcagttgtcagggaaatgttagtttcctatggagtaggagtgtacgcgtgatttaatcactaaattggcgaacactcaattaaggtggcaccgcggttatcaaaccgtccttaacacagcattggctggataaggacggtttttttgacgataaaaacggggtgaaataaatggtcacgaaacgatggcaaaactcatggatcaaactaaccaaatacaattatatttttggaggatttaattatgagtttatccggaacacacaaattaattttaacaatcggcagcgtggctattattggcggcatcgggtttaccgtcaacgcccactcgcacccagctacgactaaacaatcacaagttatcaatctatcagctggctcagaaattatgagcttagatcccgctaaaatgacggacagcgtttctaatagccaagtcacccaagttgacgaggggctctatcggctgaacagtcagagccaacccgtcaacgctttggctactaagacaactgtcaccaatggtggtcatacctataccattcaattacgccacgatgcgcgctggagtaacggtaacaaggtgaccgctcacgattttgtctattcatggagacgaactcttgatccaaaaaataaatctgaattcacctatgtcttcacaaacattaaaaataccgacgccattgcagccggcaagaaaaagccatcaacccttggtgtcaaagctaatggtgactatcaattaacaatcacgttaagcaaacccgtcgcctactttaaaaagattttagctgtttcgaccttttatccggtcaatcaaaatgctgttaacaaatacgggaagaagtacgggacttcagccgcgacgaccgtctacaacgggccatttacgcttactggctggaccgggactaataatacgtggaccttaaagaaaaatccagcttattacgatcacaaactggtgaaactgcaccaaatcaattatcaggttattaagtccaatacgactgcctataatttatatcaatctaataagttagatagtgtgacacttaatggcgagcagagtgtccagaataaaaataatcaagaactcaaaacacttgcgggtggtcaaatcagctttattcaatacaatcaccatgaccatgtagcagccaaccgtgaactccgcaccgctttatccttagcaatcaaccggtcgcaactgaccaacaaagttctagaaaatggttcgcttccagccaaaagctttggtgtacgcaatatggctaagaatcctaaaactggtaccgattttgtcaatgatgcgaccgttgatggtactgttaattatcatctcaaccaggctcgagccgcttatcataaagcacaacaacaattgggcaaaaaatcgctaacgttaacgattacttgtggtgatgatgacaactcacatcaggtcgctgaattcatccagggacaattgaccagtcacctccccggactaaaggtaacaatcaaggcaatgccatttaccgcaatgctaggtaaagtttccaagggaaccttccagcttaatttaactagctggagtatggattttgccgacccttcacaatcattaacaattttgactggcgacagcaactccaacatgggccactatcaaagcaaggcttacgaccaggcaatgcaagccgctgatggtccagatgctttgaacgcgaccaagcgctatcaagacttagttcaagccgctaaaacggcgctaactgatcaggccgtgaccccactctacgaaggccgttcccatctgctcgttaagtcgcacttaaagggcgtcatctataataatttcagcggtgccgccaattatcggaccgcatatgtgaagtaacacctcatagttgctcctaaaattacccgaccaaaaagcgtttcaagaccatagcttaacctaagccggccttgaaacgcttttagtataggaatccagtgttaattaaaagtcagtgtttgcttctcgccaccaacacccgcgtcaacaaaaagatcagttagttttaattcaaaaacaacgagtgtcgatccaatagcatcccagacttgttgataattcggaactgtttctaaatattggggtagcaagtcggtcatcgtcttagttgaccgttgtaacttaacgtgttgggctcgtagatatggattgcccgctgttccatcattaggaatcgtaatgaatgcaatatccggattctggtcataaaccttcaaagcgggacttgtcttaactgatgagaagtatagcgtatctggttgtgcttcgtaccagacaaagttaacaattttaacatctgcttcattattgacggccgtgctgagggcaatcttattagttgattgaaccacttgttttaatagtgaaatatccataccgacaaactccttttactcaattagtatcataatttcattataccgcaattgatagttttaggaacgtacgtttgtctaatgtgctatcatatttctatagcttagtttttgctttaaatgctatcaacattatttataaactgaacgcttcgaaagtagtgaccttatgaaaatcatcattgcacctgcgaaaaaaatgattatcgaccaagatgcctttccagccctaactgaaccaatctatcttgatcagacgcaacaattactggctcaactgcaacacctcacctatcctgaggccaagaccttatggcattgcagtgacaaactagcccaacctaattatgattggcttcaaaaaattgacctgacccgcaatctgactcccgctattctcagttacagcggtattcagtaccgttacatggccccggacgtctttacccagccagcccttgactatattcaggcaaacttacgaatcttgtcaggcttttacggcattctccgaccgtttgatggtatcgttccttatcggttagaaatgcaagcacggttggctgttggtcaagccaagaacctctatgcgttttggggcgaccgcctctatcaggcactgactccgcggccagaaccaattatcaatcttgcttctcaagaatatgctaagaccattgcaccttatctggctccgcatcaatcaatgattgatattgtctttgcaagctttatcgacggcaaactcaagactaaagccacattagctaagatggcacgtggggccatggtccgttttttggctgaacatcaaatcgatgatgtgacggccattcgcacatttgaccatcccgattatcaatttgacgagaagcgctcgacggctaatcgattcgtctttatctatcaacattaaacatcatcacagcaatcaccaaagcgcccgcagaaggctaacttccacaggcgcttttgtctactttaaaccttttaataaccattatagtgacagccaaacaaaatcagatcacaccgataaacttctcaatctagctattcagcaaattatttcccgggaaatgattacgctcatttctctaatcatgggctgctagccagtgacgcaatcgcgtcatataggccgtggtttcatcgataaacgccatgtgacggctacggggaaataacgtccaagtcgcatgaggtaactggtcgaccatggtcttagcgactaatggcgtacacaaatcatccgttccactggtgactaaagttggcatctgcaaatactgtaatcggtcggtatactcataatccgctaacgtaccagtcggattatattcattgggaccccacgctacattataagccgtggtccccacccgttttgatcgccgtagaaattcaggatcatcagcagtaatcgggcccgacgcatgttgcgtcataaaatgttgattagcagtcaggtaggcagcacctgtgaaatcctgtaaccgttctgctgtcgcaatagccgactgatccgctggggacattaaccgaatcatccgatgctgttcctgagcccacagtcgggctgaagacaaggtactggctaaaatcaaacttttaatcccctgtggtcgatagtcacaaccataaataatagctagcataccaccccaggactgccctagtaagtgaatctcgggtaagtctaaatacgtacgtaacgcctgtaactctgccacccacgttgcggcttgccataattgatcgtcatcaggtatcgatgaacgcccacagcctaattgatcatacatgacgattggtcgtcccgtttgaacggccaggtcatcaaatccttcaaagtaattatgcgttgatcctggaccaccatgtagcaaaactaacggtgtcttatttgattgccgatcccctacgattcgataatacgtctgataaccattaaatggcatgtatccttcttgcacgtccaaaatatcactcactttcgttactaattttttacttgttacgcgttatgcgttatgctagccgctatttagcattagccttgattaaaacgtgccaaacagatggattcctgttcgtcagcaatgcgtgtccgattccggcctccggggctgggtgacaattgctggaacgtaagccgacgtcgattagagcccgtgcacaaaccgcccggtctcaaatacgagtcttattctaagccggaagcaacccacttccgactaagaataatttggctactgagcattgtcacccagctcctccagtcggtaagccgctcgaatggctgatgaacagccactgaactcagtacaatttgtcgttggctattttaatactgaaccctttaagttaaatatcagagtgccttctccactttttcgaaatattcaattattactacggtaattcagaaatagtgagttatcacaagaccttttcaatctgacagttgattgataaaattaacgtttatgaaaaacaacgacaaattcagcaaaagttgggtatatccttgtcagccattcgaacgctatcccgactggaaggcgtttctgacaatgcccagtggtgaaatttcacttagcaagcgtcctgtgcttggttagtgaaaggccagtatttgagacgtggttttttcggctcagatctgtgcccaccacgttccggcaattggcagaaatgcctggaggtcggtgtaggacgcgcaccctaagcaagtttacgctaactcgaactgttcccagcgaacctaagctggctgcttttgaatttaaaaaatggcacgttttaatcataatcgatgacaaattaactcgcacaatgcgtacttattccatcccaatactaatgtccacctgaaaaagtgaaaaacttaattccattctaatacaactcaaatgacaatggtgatgtaagcgctacaatagaagtgcagaaataatcagaaacgggtgaataatgatggtattaagtattattacagtattaggaatgggattaattgcagccactggtgtgcactttatcaatggcgcacaagcgatgcacgcaggaacggtcggccatcatgttggtcagatgccagctaaccttcaccaaatcgacttacgttaatctcttaaaaattcacgttaatttttagtattgccgctgaaacactgggcaatgctttttttgtcgttcctttagctgaccgtccttatcagtttggtgccttgagcagcttgacagtcaagcgtatcattaacttatattatctttctgttcgtctagtcacgcttcgaccgaccgttcagagaaggagtgacttatttttatgaatgatttatttgagaaggccccgattcccaaagcgtatttccatttagcctttcctgtggttcttggcatggttgccagcatgatttataacttagcagatacattttttgttgctcaaactggtaatgctgatttagttgctggtattgccctcggcagtccgctattttcgtttatgttagcagttggtgatatttttggcctcggtgggagtgccgttatttcaagagtccttggccgtcatgattatcaccaaagtgcacgtatcagtagcttttgtttttacattgcgatcgcgcttagcttagtactgacagccttattattactattcgaacaaccaattttaggcttgctaggtgctactgcagctacccgtccctacattgcggacttctatcgtatattggtattaggatcaacctttatcatcgtttcactggttcccggtaacattatccgaacggagggtctggcacaactttccatgattgcgaccatcagtgggacggttctgaccattattctcgatcccttattcttatttggctttcactggggtgcttcgggcgttgcttttgccaacgttttggggtacgcggtcaacaccagtctgttagtcttttttatgcgccgagccaaaacgctctccttagcaccaaagttagcccatatctcgcgaccaacccttaaagccgtcgtcgcggttgggattccagcctcactgactaacctaacccagagttttggcatgatgatcttaaacagctacttagccgcatacggcgcccaagccgtggcggccatgggaattgttcaaaaagtttacatggtcgttatgatggtcatggtcggctttgcttttggggcccagcctttagttggttacacgtacggtgctaaaaattggcaaagactacgggcaacgttgcgcttcgatttaaaagtcgaaggtggctacgcaaccatttgtgcgattattctaatgatttttgcgcctcaacttattaaactatttatgaatcaaccagtcattgtcactatgggtacacaaatgttgcgagcaatgttgattacgacaccattagtgggcttcatcctcgtgttcacgaccgtctttcaatcagtcggtgcgggtttgagtgccctagccatggcgctttcgcggcaagcaatcttactaggtatcgccatcgttattctggcacagttctttggactaactggtattatttgggctcaagcggtcgctgatgtcttaacgtgcttacttggctggttactttatcggcacaccttcaaagatattcaagtaccatcctcaaattaataataacgatatcatgtcgttagctcactgataatcattaaatggcgccatccatttcaagtactggtgattcagtgcgctgaaatgcataagtgaactaaaagctggtacttttggaatgagaggcgtcattccaaaagtaccagcttttttcactctgattcatttttttattcgtctacagactgagtatgggctaaatcggcttctaatgacgcagtgagtgccttcaatagttttagagtcgccgtcatgttagcgcggtaataacgttcagtacctgttttgctaaccgctaaaatgccggcatccagcatcaacttcaaatggtgcgatacggccggccgtgataaggcgatttgcgctgtaatttggttaaccgtcatctgatcagtccggcacagcatcaccaaaattcgttgccgattttcgtcttgaagaattgtaaaaatcggaacacccttcttaaatattgccatcgttcgttctgccaaaaaatcacacctttccaattacggttcgtattcttaaaccatttaacgcttgctaaaattgaaagtcaagaattaatcgttgactttttgtaagtaagcgactagaatcaacagcatggtttgttcaagatgttaaacatttaaaccaatatgttaggagtccactatgaaagctgccattattactaaatacaagcaaataacccccatggtgacagaagtccctgttccgacaatagctcccaccgatgttctcgtcaaaatcgttgccgccagtgtcaacccaatcgatttgaaaaccaaagatggcgatctaagattgttactacaatacaccatgccactaattatgggcagtgactttgccggtgtaattactgccgttggcgaccaagtaccgggctttaaagttggtgatgctgtttacggtcgcgcacccaaagatcgaattggaacctttgctgaatttatcgccattgatcatcaagccatcgcactgaaaccagccaatctcaattttgaagaagccgctgcaattccattagtaggtttaaccagttaccaagcactacacgatataatgaacatccagccgggacagaaggttttcattcccggcggttcgggtggtattgggattattgccattcaactggccaaatatctcggcgcttacgtcgcaaccactaccagtgcgaaacattttgacctcgttcaatcactaggtgctgataaaatcattgactatcatcagcaagactttactgatgtattatcccattacgatgccgtattagatactcgtggcgggcaatccctcgaggccgcttttcagattatcaaaccaggcggtcagattgtcagcattgccggactgccaaacgcgcgttttggtaaggattacggactgccaatatggaaacaatggttattgggtctagcaacgcggaaactgagtcaactggaacaacaagcccaagctacctattcgtttctgttcatgcaacctagtggccagcaacttgtacgcctgcgacaactaattgaacaggacgttattaagccagttattgatcggattatccccctcaccgacatcaacgacgcgttagaatactcgcattccggtcatgctaccggtaaaatcattatcagtattcaacctaattagctaacttcaaatcaatctttttaaggagtcatgatcaatgaaaaaagttttaattgtcgaaaccaatatcactcgttaccaaggaactaatgagccgactggtctttggttaggtgaagccgctgagttcgtcgatgaaatgcagcaagcccaaattgccgttgactatgttagtcctaatggtggcttcgtgccccttgacccgcgtagtatgaaatataccgatgccgccacaatggccgtgtatgaagattctgacttcattaatcgggcccttaagaacacgctcaagcctagtcaggtcgatcccgatgattacactgctatttactataccgggggccacggtgtgatgtgggactttccggacaaccctgagttacaagccatcgcactggccatttatcaacatggtggatatgtgacctccgtttgtcacggaattgctggcctcctaaacatcaaagaccaaacgggccaatacttgattgctggcaaaaccattacgggctttaccgcaactgaagagctgattgccggcaaaaaacggatcgtcccgttccttaaccgtgaacgagctactgctcacggtgctatctttagtcagcatcgattttatcgcgaatatgcaattactgacggccaattgatcactggtcaaaatccgttctcagcacgcgcggtcgcacgccaattgattgctaaactataaaaaaacgagcacaaggctcgtttttttgcgttaatcttcaaaaatccgctcatgcaaaacaccaaacggcgcatgatcgacataaatctgaccagtgtcgtgaaatccattacgttgataaaaacgctgggccacagcattatttgccagaacaagtagataattctgtggatagaccgcctttaagcgacggtgggcctggattattaattgctgaccaatgccatgatgatgatagttcgggtgaacatatagcgaatacagttcgccccacccctcatagttcgcatgtctggccggaccaaatgtgcaaacacccacaacttcaccatcagccgtcattgccagcaacatattttgccaccgccgttccggccgccaagttgctggcgtcaattgctgtaaataacttacaggcatcaaatcacgatatgctgattgccaggtctcataatataactgtcgaatttttccaaaatcactgtctgcttcagcgcggacgatccgataggttagtgccatcagcctgaccacctttcaattcaagttgtccctaagtgaggcacattttatcatttatataaataaggtacccaccaactattcataaagagcatcaattagatgaatgtttcacgtgaaacaaaaaacacagtacaaaaatgaatccagtacaacatgttcattttgagtttggtattgacctgaactatggccgaactcgtcgcatatttaacacgtttggcagaattacggccgtaataataatgaccacgccaaccatttgcacccaatcaatagtttcatcaagcagtacaaatgcaacaacaatcgaggctggtaattctaaagaagaaaggattgggccaatgccaagctctaagtacggcataaacaatgaatacataaccagtgggaaaaccattgagaatagtgcaatcagtactccccagccgactgttgctggcgtggtgggtgccgtaactaattgcggtgaccacacgatagcaatgagtatgaaagcgcccaaacacagtaaccatgttttcgataacgggtctaagttattgcctaagctagccgtaaactgcatcgtgcaagcatacgagcatgccgctaaaaaacttaatatcaagccccacggcgagagcgcctgcgtaattggaaacagaccagcagctaaaatcgtgcctatcaataccaaaataatgctaaccacttgcagtcgggagggacgccgatgatgaatcactgctcctagtaatgttgataaccagaccgcctgcatcaacattaccgcggccacagcaactgggataagctttaacgcctgtatgtaaaaggtgttagtaaatcccgaagccgttccagccgaaattaccagtccgatttgcttccaattcgtttgctgattacgcaaacgtgcacggcgtaaaatttgaatcacacctaaaatcacaaccgcactcagaaaggaccagaatagcaatgggccattgacaaccccctgccgacgcgcaattttaaatagtgacgccggaattccaaaactaatggcccctaagccaacgaacaggggcgcaattttcttcacattaatcatcctctcgttgacaagatatgttggagccgggcacgataccaccagtctggcaagcccagtgagtagcgcatcagcatctcaccaataatttgcacaattgggcgtcccggttgtatttggcgttctaacaagctgtcataaaagtccgctggggcactgactaagtgcccgttaagattgacccgtaacggcgcattttctaccacgagcgcttgccattcataactatgagcacgctgttcgtcctcagaaacgtcttgtgccaactgtaagtaatgcgcaatatccgctggcaatacttccgataaatccgacaaagtctgtaaagctagacctggccgagttatcacttgacttagcggtaccatcacttgtctcaattgcgcgtctgtgtctgctaactgctgacacaaccagtcgaatcatcgggcatggtagaccaccatactcgtagcacgcccccctgctcaacttgagactttaatattaccaacgcttgcttgacaaccgtggcatcggtactgtgtgacatgatagcaagctgtgctggatcatcagttgtcaatcgagttaaatcaccgatttgtaacgacaatggcaaactcaatactggctggtgcaactcatgttgcaaggttaccgcgaacgtcgaattaaacgtcacatccatcatctgactttcctcaatttctattttgatggcgccttaaaatgtgctaattccgcatccgaataaacgtacgggacgtgcgccatctctggcacttgattccaagctaccggataacccgcaccatgtgcgcaaaagaccgagtccggtgtattttctaaatctgctgtggggacatattcggtcttatcgacaacagccatctcgttatgacacggccgatagccatccacgatacattccaattgcccctgcccatgcgtgtaagctcgaaccgtctgtgaatagtcctgcatcgctgctactggcgccgttcccgtaattgtcgtcaagtcagtcccgtccgtggctacgcttgtattagcgaccggtgcgtcaaactgaccattcatccgctgaatatcagtcatcgcccggccaacttgttcctgaccaatttctagacggaaccgataccacggctccaacaactgacaatcaccacgttgttttaacatcatcaagccttgacgcaacgcgcgccacgtcgcttcacgaaagtcaccaccaaccgaatgaacattgctagcccgaccactaaccagtgttaccttaacatccgttagtggtgcgccaatcaggacacccacttgtgttttggcttgtaggtttgacacgacttggtgttgccaatttcggccaagcacttccaatgaacaatcggtcgtaaattgaagcccacttccccgcggtgcgggcgtcagcaacaaatgtacttccgcgtagtgtcgtaacggttcaaaatgcccaacaccttcaacagcttgggtaatcgtctcttgatacaagatactccccgttccaaactttacagtcagttgaaaacgatcctgcaagatttgttgcaaaacttccagttgaatcgttcccatgacctgtactcgcaattcctgaagtggttctgaccaagtcacgtgtaattgtggatcctcatcttcaagttgacgcaaggctgctaagcaggtgtgtaactcctcacgctgaggatcaagtgcgtaagtcagtacgggctgcatgacgggttgtagactagttgctgcctgtcccaatccttgccccggccgcgttcccgttagaccggtaatggcaccaacggatcctgccgtcagcgcggacgtggtcgcatacttagtcccgttgtaaacccgtaactgattgactttttggtcatcatacacgatatctttaggtcgtaaggtgccaccggtcatccgaatccaagtaagccgttcaccttgatcatcgtgcgtaatcttgaacacccgcgcgccaaattcaggacgcgttaattgtggcgtcgtccaataatcaagaccagccattagcgcatcaaccccgtccagcttaagtgccgcgccaaaataacacggaaaaacttcccgccgttgaatcatctgccgaatcgtggcatcacttaacgtccctgtttctaagtaatccgttaacacttcgtcattttgcatcgcaatatcttcaactgccgcagtcggtatgactggccgatcttccaacgtgtccccggctcccggcgtgttaaacgccacacaaccaggcgataatgtctgttgaatttgttgtatcaattggtcgctatccgtccccggcgcatccatcttatttacaaacagaatggtaggaacgtcataacgggctaataatcgccataacgtccgcgtgtacccctgcacaccatcagtcgctgaaacgactaaaattgcgacgtccaaaaccgacagtacttgttcagtctgggtcgcaaaatcgacgtggcccggggtatccaagagtgttaaattaatgtctttatattgtaaattagcttggtgtgaaaaaatcgtaataccacgctgtttttcaagcacatccgtatctaaaaaagcatcgccattatcgacgcgccctaattgccgtagcgcgccagaccggtatagtaatgcttctgacagcgtcgttttaccggcatcgacgtgggcaataattcccgctacaatccgtttcatattgggctcccttcacgagtagtgaatcactgcttccagtataccggttctcagcactgaacggctagtaaaggtctgccactaacgttaaatatgcatgaattttggcgtgttttagtccaatgttaatcaccaaaatcaggctagttactttccatagttgcgatcactttaaagtagtggtgacccatttcccgtgcagtatcgcaaaaaaggtatccgtagcctacaactaccgataccttaaaatcattttcagacttaatcataaaaacgctcaaaagctgccttcaggtccattttggcttgctttaatgcctgtgataccgccaccccgttcgtttgcagtccttgtgcacggacaatctcaaaccggtcaaaccccataatttcagtaaacatcttgtcaagatacagccgagaaaattccatgggtgtataacggtcattacgagtatagattgacccactggcctgcagtaacatgacacgataattatcggtcatcaaacccactgatccattttcggtataacgaaaagtctccctggcaactaagatattatcgatatagtcctttaaccgtgccggcacgttgaaattatgcaacggcatcgcaatcacaatccgatgatgagctttaaactgttgtaggagttgctgattgattgcaaacaggcgttgttcctcaatcgataaatttacatgttgcgcttgcttttcccagattcccagcaattcaggtaccgttgcttggggaatcaccgtatcatacaaattgatcacatccacagtatcattaggaaagcgagtctgaaaaagttgcaaaaaagcttgttctagttgaactgagtagtgcgccgcattacgaaaatcgggatgtgcattaacaatcaaagtcttagtcatttaaatatctccttaattaataatctatttattggttgtttttgacaacagttatatactacagtcgaaaggtgccaatccatgtcaccattaaaatcatttttaggagttatttatatgaaccgctctgaacgtcttaatcaagaattgatctttctcagttaccgacaagaattccacatcaaagaactcatgcaagaattcaatatctccaaacggaccgccttgcgcgacgttaactcgttagaacaacttggtttgtccatttacgttgaaccgggacgttacggtggctaccaaatcatgcaacaacaactatgggtacccatcttattaaacagccaggaaattaatgcgctcttttttgcgctcaaagcactcagtttattgtcggcgaccccctttgaaaagtcctaccatacaatttacaaaaaactcatggcaacactatctttaagcaaccagcgccaggtcgccaaattgcaacgtgtggttaactactactcaattcctaacttggatgccccaacccatttaagtgatttattaacggctatccttgatgaaaatgttgtccagttaacgatgactactgtgacagctgggtttcagatttttgatttattatatcggcatggcatttggtttttcagtggcgtcaatctcgataacaatgcttggggcatctatcgctgtgatacgatcaaagcatttcaaaccagtgagcaaccagctcggtatacttggaaacagctcgcgcaacggcaacggtcctacgatcaccatcatcacaatatacgttataaatgtgcactaacacctctaggccgtgaacatgtacaaaagaataattatcctaatatgcacttaacacatcagaacgaccaagattatctcattggtggttataatcaagatgaattagcctatatggtcgactatttactgggacttggccgcaacgttagaattatttatccggaagcgttaaaaactgcctatctgcaagaactgcagcaaattcaagatttctattaacgtttggttttctgaacaaaatgtcggtagccccgtcaagggctaccgacatttttactaacctgattattctcttcttaactgctttattcagccgtaatataattcaaaattgcattcagaacttgttgattctctcgtggtaccggcgtttgtaaaatttctgctgctgtttggtttaggaccgaccccgcaacataccgataatcattaacgaccatctcacgaacattgtccgcagccagctcaaagtgaaattgtaaccccactacccgatgcttccatacgaagccctgattggtcacacgatcactagagaacaacagcgttgcttctgctggaacagtgaacatctcctcgtgccaatgcaagaccgacagttttgctggaatccccggaatcacgggactctgtcggtaaatcggtgcccaacctacttccttagctggcgccttagtgactgggtatcctaaggtcttcgcaatttgttgcgcgccgtaacacgcaccaaacattgggatatcgcggtccaataattgttgaatcaagtctcgttcctgcttgatccatggcagcgtatcgttgggactcatcggtccgccgaggataacaagcatctccgtctcatccgccgttgggagaacaccgaattgatacgggtgatagacatacatggtatgaccatgggcatgcgcccaatcagcaatcattccagggccctcattgggggtatgttgcaacacattaattcgcatgattagtcctttccacaacggcaatgtttggtctgggtatcgcctgcaattacccaagatagagtcattataccacgctaattacttgagccatgggcgcttatgttaaacttaaaaccgatcataatttagaggtgataataatggacgtccaatcttttttcgaacaagctaaaacgacgctcaaattgacacaaagtaccccattacaaagtgcttatcagtttggcagcgatcctgataaacttgcacagctcgtactaactggcacaaaagcggctaccaccagcgcttatgacctatacgaaactgatgaaccactgccaaaagtgggcgcttatgacgtcatcttagatgctcataatcagcctgtctgtgtgacccggaccgatcaagtcatgattacgccttacttggacatcgatgcaacccacgcttacttagaaggtgaaggcgatcgtacttatgcctattggcgccgtgttcatgatgccttcttcaagcaggagtaccaaagcgagcatcagcgctttgatccccatactgcacaaatggttctggaacgcttccacgtcgtttatcccgttcactaaaaatagcgttccaatcggcactggtgaattcgcttccattagtggtatattggaatagaactttcattagggggaacgacacatgcatactatcgaacaactcaatgacgggcgcgcggtctatctaaatggtcaccgcgtcaatgtcgccgatgtgcccatttttcgtaaaactttagcactcaataatcagtactatgacctgcaacacaaccatcccgaagtacatacttatcaggaaaatggtcaccgctacgatattgctttcaaagtgccacgcaccgtcgctgatttacaacaaaagcaccgtgcttatcaagaaattgcgcaaagtaacagcggcatgttaggccgcacaccggattttcttaatactgggatggccgtcttagcagaacgcgctgccttcctcgggcaaaatcaatatactgattttgcagctaatgcccgcaattacgctaaggaggtcaaagctaacgatatcttcattagccatgcgcttcaaaacccacaactcaaccgtcaaaaagccatcaatgccattccgtctggatacgcgggtgttcataccattgaacgtaatcaagatggaatcttcgtttctggtgccaaaatggtcaatacgatggccccaattgctgatgacctcctgatttttaatccgccggaactgttgttagaaaacggcgatagtagttatgctgtcgcctttgctacgccactcaataatccgggcgtcaagatcatttgtcgcaaattattagatcatcccaccgcttccattacggattacccactcagcaacgcccttgatgagattgacgcctacattgtctttgatcacgcctttattccgtggtcaaaagtatttgttgaaaataatgttgaaatgagtaatcgtttcttcatcgattcaggcatgtttagccacacttcccatcaagatgaggttcgaggtattactaagcttgagttagcaaccagtttagcgcttcggattgctcatatcttaggattagatggtttcttaggtgtccaagaaaaactcggtcggttaaccgctaatctggaactcatcaagggtaccatcacccgttcagaagacaacggtcatctggacgaattcggtatctatacgcccagtctccaagctttgcaagcggttcgctcgacccttcccgaatactatgacgaggccttgcgcgtgactcaacacttagcggccggttccatagttggcgtgccaagttttgcggaatttgacggcgataatgcgacaatcctcaaccaggcactcacgacggaccgagccaccgctaaaacccgcacgcgcttgttgaacttagccttcgatttaacaagttctggctttggtcagcgccaattgatgtacgaatactatcatggtggtgatccaatgcgtattcgtgcccaacattatcaacgcgccgatttacaggctggcaatcagatgattgaccgactattgtcagcggacaacgcaaacacccatgaataagtaatcacaccaatacccaggttagtccttaagtgagtattggtgtgattttttgcgcctttatattattgactatttagtcaaatataattcgcgtaactgttgacattccgctgaggtcagccctagacccgtctgcaagtaatttgaaaatgtgtcgtaccgggctttgataacttcaaagtaatggctcaggtaatcagcgtctactaataatgcctggttcacggcccgttgttgctcatcagataattgcgacgccatcgtcgccaagatttgttgattagcagctgcacgtgcttgatttgtgagcagatagtcagccatgatttgctcgtcactaatacccaaaatttttagaaataaggcggccccgacgccggtgcgatccttaccggcaaaacaatggaacagtagtggctgatctggaaccagtagtagctgtataaattgacaataactttgacgggcagtaggatctaacgctagctgttcatataactgaaccatgcggtcatggaccgcccccgtactactaatcatcgattgtaaacttgcgtcgttcgtcatgacttgtgctagcacatccaacacgtgatactggacgtgtggccatgtcgcatctggaaattgatgacgctcatcagcactacgcatgtccacgattcgcgtaatgccaagcgtggttgctagatactgcgtctgtgccggtgttaattgatccaattgtcctgaccggtaaattaaaccatctttgattacttgctgatttttattgcgataaccacctagtgaccgtaaattagtaatcccttccatgaccaagccccctgctagattgataacttaattgtaaactgtcaccgttaaattttcagtcaaaggccatttaaaaagtcatttagtcaccagacctaactgagctggtgactaaatgactttttaaccgctaacttgatagactcaattaatcaaagtgtcgccattcgtgatccaacaacgcacgcgctacaaatagcccgagcggtaaaaacatgatgattaacacggccttcgtcagccatagtgaaccgacaccaatttgattattgccaatactataaattgcacgataaatatataatcccggaaccataattacgattgaaggtaccgtcaatgaaatccggggatagccgttataacgattaaccaccgatgcgatcaagccggcaacgagcgccccacaaaaggcggccgcggccggtggcattgctgtcaagtcaactagttcaaggcgcaatgtattcgcaatggccccaataaatcccgcggtaatggccatcttttgcgaactattaaacattattgagaacccgtaaacgccgcaaaaactagctggtaatcgtaataaaagtaccgctaacggtgaaagtcctagcggtaagaaatcagctggcttgaagctcaccagtgtcgcgactagccatccgacgagagttgcaatcagggtaaccataatcgcgtaagctaagcgctccagtcctgagcgcatatccaacttagagatatccaacatactcgtaatgaacggaaaacccggaatcacgaataacatggcaccaatataccccgcctcatgctgggcaagaatttggaaattatattcaaaaatcttaaaaccaaccatataagccaaacacgccaccgcaacgctgaccgcaatcccggcaaccgtcgtcatcgaccgtttacccatcagcgcccgaacatagttaccaagacccgcgcccaaaaaggaacaaatcatctcgggaatacccccaccaagtaagaagataaatccactacaggctaagccagctgccaacccaagaaccagtggcgaatactgtttaggacgcgtctgaacttcatcaattgctgcatgcacttgtgccaccgttaaccgtgcatatttcgcatcaaagtctttgacaaactgttcaagaatatttagtttatccgtatttacaccagtatttggtatcgataatacttgcgtataactacgttcatgatgaaaacacgtgtactgaatcgaaatcaacccgatatctgccgagcacgttaaattcaggctgcgagcaatcttattcatcgcatcacgaacccgccacgctcccgtcccacacgacaacattaaaatgccaactcgaccaacaattgatgttcgctcttgtaagctagcatgcttagcgggaacatcttcattacggataaagtccttccatggaattgtcatatgatgtcgttgtgatagtggcatcaccgacttacgctctttattcatttcttcctccgtcttagatcgttcattatgttagtagctttcccccttattttaggctactaacatcatttatgatagcgattttgtcattttaaaagcataatgtttcacgtgaaacattagcctcatgatgagtttccccagcttgttaattgaactaccccctcaaaagtaaacttgattaccattcgttaatttaagcgtcacaattttcgccgctatccgcaatcatatgataagttaccgatatcatctaataaaggagcgatttgtatgtgcactagtctaacttatacaaatagtcatggaggccacttcttagctcgtacaatggattttaacgttgactttgagacccgtattatgttcatgcctcgacattaccgcgtgacgggtgaccttggtgatttcaccacgacttatggctttattggcgcgggtcgccaactgaaccatgaaattttcacggacggcgttaacgaatgtggtgtcagcatcgcagcactctactttccgaatcatgcaatttaccagcctcacagtaaccaagacaaaatcgatctcgcaccccacgatttcgtcgcctgggtactcggaaaaatcactagttttgctgacttacgtgagcgcgtcaaagacgttcaattgattagtagcacggcagaattaattaacgaaattccaccacttcactttatcattagtgaccaaaccggtgaaaccgccgtcttggaaccaactagtggcgagcttcgcctgattaataacccagtcggcgtcctgaccaattcaccgaacctcaaatggcagctacaaaacttaagtaagtatggcaccctgactaacaccgagcggccactaaataaattcattaactaccaacctggttcacagggacctggtacgggcgcattaggtctacctggtgactatacttcgatgtctcgctttgcacggaccgtcttcttgaaacactatgcgcaagtgccagcgacaacaacagatacagtcaacttacttcaacacatcttgaatgctgtgactattcccaagggcgccaaagtagccgccaacggccaagcaacctatactgagtaccgtagctacatggacttgaatcatcaaacgtacgcactagaactgtacgaaaatccgggagtgattcagcaagttaacttaactgatcatttattagaaaaacagaccgttccgttagaatacgcccttagtcgcaccccgcacgtccaattactacctcccgatattgccaccttgccagtggcccattaagactttcagaaaagcagtaactcaaaaaagcttgcatcacaaatctagttgattttgtgacgtaagcttttcgtattatttaaacttaggctaacgcggcttttagattagctaaggttaattcgctcgttgaagtgaagttaacatccgcacccgtcaaaatggcaggatcaccaatcccaatcgacgtttcaccagcaccattaattgactgaataccgaccttagcatcttcaacgcccgcacattcttcaggcttcaagccaagcacttccgcgccacgttcgaagatctctggatctggcttaccgtgtttcaaggttgcgggatccacccgggcttcaaagtaatgcgccaagcctaactgttccagaaccaatggtgaattcttagaagctgaggccaaagataaacgatacccatgcttggcgagatcggctaagaagtcttcgataccaggtaaaattgcagttttatccattcccttcaacaggttcagataattagtatttttcttggctgcgtaagccactttttcagcttccgtatagtcgttttccttaccacccgtttttaagatcaagttcaacgagtccattcgactaacaccctttaaattatcggcaagttcttcactccaggcaacgcccaactcgtcagctaattgatgccaagcttgtgagtgataaacggacgtatccgcaatcacgccatctaaatcaaatacaaaccctttaatatctgcaaatttactcattaatggttcctcctcgttaattaccagcacaattgattgctgggtaccggacaactgcgcaatcatcaatagatgcgccaagagtgacggttacccgtcttgttttgaagcacaccgttaatgttcacttaacattataaaacgctttcagtttcaatgcaaccggttgcatagcgattttaatgacgattgttgccaatcacacgcctgcccgccgatcaaatcgcaatggcggccccattactgccgtccatcctgaatttacggatttactaataatgactgttccaaccatttttccacaaacggttgcacgcttttatgccccgcttaatcttgggtcggaattggaatatccggtcgatactggtactgatgctgggttaaaaattgccgtaatttaaaactagcagccaatttaaagcacgtttccgcatcccgtaaatcgcatccggtcagtgttgtgatatggtgcagtcgattacgcagtgtatttggatgaacgtataattgcttagccgtgcgggtcaaattacaagtcgcccgtaagtagacatctaatgttggtaccagttctgtatggttttgctgatcataggctaacaacaaacgtagggctggattaataaagaacggtaagatctcaagatgattaactcgtgccaacgcaagattatagaattggtcttcacaaaaaatcacccgaccacggccagtcttcagttgcgccgttcgttcacaaactgtatacgcggcaaaggtatcttccggattaacgtagtgctgagacacgatcaagcggcaatccgcttgcttcgtaatttgctgcaacgttagtttaaattgattctgattatatgcgaccagactaattgggatcagtgccacacattgttgctgataagtcgaaaccaacacttgtttgaatcgtggcatcatcaagtactgtagtcgctgctgtaaaatcatcggtgcttgatcagctagtggttcgcagcggattaacaccatggctgtcggtaattgcacgtgttgttcagcaaactgatcagcaaacgttcccccttgatgttccgtcaataataagtttaataaccggtcccgttgcgattcagctgttggcataatctgatttttaactaacgagccagcgataacctgaccaatcgaattgatcagtagtgcttgtcgatcattcagtggtttattgagtgctggcatcaccaaataaccgatcggctcggtgccatttgctaacggcgtaattagcatgggccccgccgacaactgatcttccgccacatagacttgcgttaaaaaatccggcgtatccggtgcaaatccgtggtctaacagccagcgtccgactcgattcgtctcaactgcagcgtgaatactagtcccattgagttgcgtcgtatgcgaccgtgtcagaatctccccgttcagatcaataatcgccagcggattctctaataagtgtactgcttgggccagtgtggtatcaaaatccgccgtgattgcttggatagcgagctgattgatggctgcttgaatttgaacatcgtggtgtaagcactgaccaagcgtcattaataatttcaataactgattttgtgccgcaatgatcgtagtcagaccggttcccagatttactagtccgaccgactgacgatggccgtgccaactataagcaagttgaactagctgacccgagtcgggggacaaatataaccggtggcttgctaacacttccgtcggatcaacaaattggacgtgagtaacttcgggattatgtgtaaatgttggatcgacagtcacctcaaacgttgtggctaactgccgcaataacggctttaattgcatactcaagtaacctccttattcacgcttgtcgccttcatcataaataatgtaagcgcttttgtaaagaggcctactgacaacccaccaccccactcgaaaggccctcagctttcttaggcccgtattcggacaaaaaagagcgggaatcccgctcttttcataaacctattaggctaagaaatcagtctgtgttttggcatcgtaccgagtcgtatggagcggttcttgcgctgctttcccgattgcgatccccattactggcacgtatcgtttaggatcaagacccagcgtcggaatcatcttttcaaagtcaattccggagaacgcattggcatcatacccatgagcccgtgccactagcagcaactgcatcccgacaacggaacaatcaatcgtcgcatcgaatttcaagaaatctggtgtggcattttcatataatggtaagaaggttcccagaatctgatccaagcgttccttcgtaatattcccatcctcataaactttgttccagacatcgcgataaacataatgcgactgggtgtcaccggcaataaagacgatggccgatgcactgtcgacctgtgggtagttgaatttcatcacggcttgtttgaacttagcctttgcctcgggggtatccacgacgacaaagtgccatgactgtaaattacatgccgatggcgcggtggctgcttccgcaatcatcttttgtaactcatcacgtccaattttaacgttcgggtcaaactgccgaactgaatggcggttaaacatcacgtctgctaaatcattgttcaccaaattttttactgcttctgacatcagctattcctcgctttcgtaatcggcctaaataatgtaagtcgctgccttgggattgaagaaactccggtcataccgacccgttaagagctttggcattgttgtcgcagcatcaacttcgtccaacttcagtgtgttaaacataactgacgtgtcgaagtgaaaccaagcggcaccgagtggcttcaagaccttcaattcgccaaatggatcatcatcggttgactccaactgaatacttaggttcccaggttcaacttgatcagctaaggaccgtaattgagtcgcaactaattggacattactgaaatggttcgtcccatcttcatgttgatcaatgtcatatttatagaagaaactattcatttcggcttccttacctaacgcgagctgccccgcaaattgtttcataattgacggatcattcagttcaccggccgtccacgaaacgttcagtaatgtcttgccatggcgttcgaccgtggctgtcgcactgttgtcattccggcgcaattcgatgtcatccgctaatttcttaggaatcccagcaccttcccgacctgcaatcacaccactctccgccccgggaccgtggagtaagaggttaatcgggtaagcgcccatcattttatccttgtagctaactaacgcaaataggctttcttcaaggtatggggcactaaaagtcggttttcccatatgaacgacataaccgcaaaccaccggtgccattaattttaatggtgctggaattaaagccttaagcaccgcttcgtcagtggcataagcaaacccaataccttcctggtcattcatgcttggtgctgtcaaaaagttcttaacatcctgatcacttgcaataaaacttgccatggtaaaacactcctttgtttgcgtgattagcttacatgataccgtccatgatgtgcacgtctggtgcgccatccgtcacgatccgtttaactcggtcttcaatcagtggattatattctggatgggtcaaaatgtagaaacggttatcctctaaggctttaaagacggtatcggcaatcgtatcaattggtttcccgttggtaatgacatacttcgcaaattgttgtccctttaagtacgcttcactttgataatacgggtccgttgggtcgctgtattgcgctggccggtgattttcagtgtgatagagatccgtctgaacaaagccagggcacatcacgtgcatgtcgatatcaatattagcccgttgtaagtcataggcggtcgcttcagtcatcccaacagaagcgaacttgctagcatgataagaaggcattccgggcgtatcaactaagccggcaatcgaagccacgttaagaatatccgcatgggtcttctgttgaatcataattgggataacgcgcttcatcgcataaacttgactcattaagttgatatgcatgatccattcccaatcacgagtcggcaattcccaaattcggccaggtagcgcgatcccggcattattaatcagtaggtcgatccgcccaaacttttccatggcctgctcaaccgcatcgtcgacactagcttcctttgtaacgtcagcggtaaccatcaacacctcggcacccttgtcgagaatatgttggtacgttttcttcaaagctggttcgtcgatatcaacaatcgtgagcttcataccccgatccgcggcgccttcagcaataacttgaccaaatccgtgggccgcacccgtgataaacataactttatctttaaaatctttcatgatgttttgcgtcctcctcgatgaaattgtgattttattaacttatcagtaaatattaacctgatgaccggtcatttatcttgactacgctttcatattaacccactaaatttgtttgagtaatggataaaagtactagtcttacgacgattaaactgtagcttttatacatgtgtgttggttcacaattataactaactaaagtgtggttccaactttaattagctcataaaaacgcatgccagcccttcttagcttacatgcgcatcattataattggatttattttcttaatactgcaaccgttcattgtgcacggctacgttgccgaaacattcaaggtccgtgccagatcaatcactcgtgctttgatctgatctcggacctgtcgaaatactagcaattggtcactaacactgccagtcgtgcgagccggatcaggcaatggccagtgtagcctggtcaccgttgccggagtgacggggcagcgatcccgtgcatcaccacacaacgtcaccacgactgcacactgattaagataggtcaggtcgattaatttagaaacctggtcactgatatcaatacccacctcgctcattacttgaacagctagtgggttcaggccatgtgtctccaccccagcactagcaacttgccagtttggtcccaataattgctgtgcaaagccttctgccatctgactgcgacaggcattgcccgtacataaaaaatatatttttggcatttcgccgtcctcctaaattactgacgataacgacactaatcgcgtatcatcaccaatattatgcccgcaagaatcccgcttgctccgctaataaccattaagatacaacatcgtcatgcgcgtaaccgcgatagattgctgtgactattccagcaatcgaataagctagccttaaccctcaagaatgcgctcactatatttttgtaatcgatttcaaaacgatttatactagaattgatattacaatattattctaaacttataaccagtccccctgagcagttactcatcgcgagaacggtcttatttcaactaatttatcggaggtcttttccatgacagtagcaattcgttatcaaactcgcaatggcaatacacaagcatttgccgaacaaatcgctagcgtggcaggtgttccagcacaatccatcgatacacctgtcgaacaagctgacacactcttttttggcggcggtacttattttatgaaacccgacaaaaccgcatctgcttttatgaagaaccttgatccgactaagatcaaacaaatcgtcctattcacaacttctggcggaccagaaatggtttcagacaaagccctgacaaagattgccaccgaaaagggcattcccgtcatcggccacttccaccaagtcatgggtggcaaaggaatgaaaatcatcggcagtactggcggcaagctcaaagatgagcagattgaactcgttaaggaattcgctcaaaaaatgttagctcaataatgatttgacggcgctcgcgttgactgaaaaagtcaatgcgagcgctatttttggattagtgctgaagacctaattagcccgtctaatttgacgtaggacgtcaatgcaccgctgctgattagcgttaggcaaaaaggacttccgcaccgccagttgcatgtaacagtgtaattgctcttgggcagctagtggaatccctacaacctgatcacttagcactacggaatccgcaatgaccaccccaacaccaacgttttgagcaactagaccttcgactaacgcgttggtagctgcctcgtagacgattttaggctgtatgtggccgcgctgacaatattgttctaatgctaaccgtggtaatgcgtgtttaggacgagcgatgataggcactccttgtaagtcagttgctcgaatcgtttttaagtgacttaatggactattgacattggctaagacctgcatctgatgttcctctaagatgctcacccgtaaatccgtggcacgttctgggaccaaagttgaaaaaaccgctgcgtctaacttgccttgccgcaagtcaactaacaattgttctgaatcagcaacggtcgttgtgacctggtctaataaatcaactgagataaatttttttatcacccggggaagccaaataccacccgcaacattggaaaatccgagccgaacttgctgctcattagcgtgatgaacttccagtgccatctgcgcaacgtcttttaagagttgcttagacttaatatacaaggtccgccccgctgccgtcgttactagttgggcccgatggttggcctgcgttagtaatactgcttggtattcttcttccaatcgtcgtaaagctgcagaaatagccggttgtgtgacgtgaaacttggtcgccgtggccgtgtaatttcccgtctcaactaatgaacagaagtactttaaatcgcgttcattcacgtcaacgcccccattcaatctatttaatacctaattttaacacgaaagatgcggcaaatcgtggtcaggatcaatcacgacttaccgcatctatattgctcagttagtcttaccaaaagcctaataacttggtccacagcaagcccccacctaaccagatgacgttaaaaataaccccaataattgcactcaatcgccaccactccgcactagtcacatagcctgtacttgacaataatgccgcgggcccggccgagtacggcgtcgttgacaagttgattgaaccagcaaatgccaatagtaacgccgctaaaacatggggaacaccggcaccaatggcgatggataaaaagccagcatataacgccgaaatctgtgttgaaacactcggaaacatgtaatgtaagtaaaaataagctaaaaacaggataatgagcacgctaatccagttcataccattcagtaaatgacctaacgttttggaaaaccatgggaaaaagcctagtgtcattagcttcttagacatcatcatcatgatcgataaccagactaaaatattccaagcaaaatgttcattgagcaaatcgttagtcgttaacacgcccgtaatcagcaaaataacaactgcgataaaacttacttcggtcgcatcgatgccaattttagtcccgatcaaccataaaacaatcgctaaaataaaggtaattgacataattttttcactagctgtcatttttccaagtgcggccaaacgcgtcgttgcccagcggtgcgcgtctggcgtttgtttcacctcagggggatagactttatatagtacccatggaataattagtagcgataaaatacctgggacacaagcagccataaaccattgcatccaagttaccgtgattccctgcatcttagctaaaccaatagccaccatgttgccagctaaaccggtcaaaaacaagcctgatgtaatattattaacttcatattcattaaaaactagaaatgagcctaattttcgctgtgtgccctgtttcggatcagatcccatttcacgagaaagattatcaataatgggatacataatcccgttgacccgcgcattattgctaggaataccaatcgccaatacggcatcaacaaaggataaggcgtatgctaagctcagcgtgcgcttgccaaataaactgacaaacagataggcgatccgcttgccaagtcctgatttaataaaaccagcagccatgaacatgcacatggcaaccatccacgccgtcgaattaccaaaaccagtagcgacttcgtccatcgtaaaaacacccgttaacgtcgcgacaacaatcccaatcagcgtgacggccatcatcggtaatggcttggtaatacaagcaataatcgttgccacaagaattgcaaataagtgccacgccataatactaattgctactggtcgtagtggcgtaactagccataacccaattcccaaaattagcggtaacagaaagcccttccattttatttcactcaacatctgcacttcctcctaatcttcatataattgttaagattttcacatatcttgccattaacggttgtttgccgtttttcaatatcaccataacttaatttataagtctgtcaatttaaatttagttgtagttgcttgaggtgtcgcaataaaacccgttatatacagcctacagggacctgtttgcgattaaaaatacctgaaattatcatagcgactagtgccttttatcggacacttttataaatagaatttataaaaagctaaaataaagtttgccacttgcttaattctcactaaagtttcgacaacccgtcaaattaatcacagcttgttatccttgtcacaatagcattctgttggcttcgttaaaattaacggttgttttttctaggtaactatttatattgaaagcgtaaacaattcgtatacttatccaactaaaaactaataaaggaatgttaattatgaaatatattgccttgattggtacggcggcacaacagtcttacaaccgtgaattattacaatttatgaagcatcattttagtcaacgggctaccattgacgttaatgaaattacagggattcccctttttaatgaaccaactcaaaatcatatcccggcgaccgttcaagccttaaatgataaaattagccaggccgatggggtgatcatcggggtacccgaatacgatcatgccattccggccgcactcaagaacgttattgaatggctttcttaccagctccacccctttgctaataaaccggtcatgttagttggtacttcccttggcgtacaggggacgtgtcgtgctcaaggtgacttacgcaatattctcaatgcgcccggagttgatgctcaggtactccctggcaatgaatacatgttaagctacgctgctaaagcctttgatcagaatggtcaaatgaccgatgccccttctatcaagttcttggaacggtgcttcgataactttgaaaaatacgttaaggcactcaacggcacgcccgcgctcaatgtgaactggcacggtaactacgacgtcatcgttttaggctttggtggtgccggtgcttcagcggctcgttttgctgctgataatggtgcccacgtactagtagttgatgcggcaccatttggccgtgaaggtggcaacacccgatactccgcccaacacgtcgttacgggtgaaagcttagataaactaaccgcttattatcaagcactgggcgcgccattcagtacccctactaagacactcaacgcctatttaagcggcatgagtaaaattccagcatattttgaaaaatatctggggattaaagccgttagttggaaacatgatattaaacccggtgatgccgttgccatcaagaaaaccatggcggaatacccagaactagccggaagtgatacgattgactttgccctcgttcacaaacgtgataaagacgctgcattatggaaactactccggcaaaaagtccttgaacgagctgacaatattgacgtttggttggactcacgggcacaacatttgatccaagatcctaatactaaagtgatccaaggggtccaaatcaaacggggcgagcgactgcttaatatccatgccaataatggcgtcgttttagctatgggtggttttgaaaacaatcctgagttaaagcaaacctacttgcacagtgatcatctgacaccacttgggacgctctataaccgcggtgatggtatcaaaatggctcaagaagttgatgccaaaatgtggcacatgaccaattatgaatctcacggtatcttacctggaatcaccttcaaagaagacgccaatgaacggggccgtcaaattgaacactggcctttattaaaaaacggtagtattttcgttatcgctgatgacgggacacgctacttccaagaagacgctaagcaccgtcacggacacgtttacacacatggctcttggctaatcccaatgaataatcagcacccctacttaatttttgatcaaacccagtacgatgccttcaaacaagaagaaagtcaggctggtcagttaccgtatccgaaattcatgaccaagctcgtttccgcgccaacgattgcacaattggccgccaaattgggagttcctgctaataatctacaacagacggtaactgactttaatcactacacagaagtgggacgtgattttgaatttggtcgtgatccgcaaacgatgcgtcaactggacgatggcccttactatgccattgctgcggccaatgacgtcctcaacacgcaaggggggccacaacgcaatgaaaatgcccaaattctcaacgtcaatgacgaacctattccacgcttgttcggcgctggtgaattaggcggtatcgttgcaaactgctatcaaggtggtggtaatttagccgaatgtttgatctttggtaagttagccggtgaaaacgctgctcgtccaaaggtagatagtgaatctgtcaccgccaacgaagccaacggaattaatgaccttgttgatggcgaaacagcatctaatgttaaactggccgctgatcaatatctcggcagttccaatgccgggctaggtggcaaagttattgtgcgtgtgacttacaacgaccataaaattcaagcagtcgatgttattcaacaccatgaaagtgaagatgttggtttaaccgctatcgatcaaattccacaagaaattgtggcagccaactccactagcgttgacgccgtttcaggtgcctctgcatctagccgagctattaaagaagcggtccaaaatgcgctgaaacaagtcaaagattcagtcacgaattaagcacaattcaaagcgaatatgtatttgagaacatcacgtaactcacgagttgcgtgatgttttagtgtcccatggcgaaagtttcacgtgaaacattttaggacttacggtatttgatttccaaatataagttatgcaaggtgcctatcaaaacagacaccatctattgccaaaatcagcagtatccgttatactgtttatcgctgtggctataatcggccacaataaggagatgattaatgatgatggcatcattatctgtacgcaaaagtgctgctcgttagcgacacttttcgacagaacctttcagagaagtgtctggtttgaatctgaaaggaattatattatgcaaccgacaattaccacctatcaatacagttatattactcagcaagtcaatcagttaattagcgccgagctcgccgtaaacgatcttcaaattagagccgtcgtacgggcacaagctatcgagcggattacgccactgcttcctagtgacaatccaatcaccgctaatttcttgtcccatttgcaaacggaccggctaacccgtgccaaggcccctcaactacttgaaacgctaattccgctaattattccgtttccatccttgacgacaaagcaactaagcaagttgtttcgcaaggtcaaaaagttgaagcagcctgtatggtcacaattagcattacacgaattgacttacctaggttggaatgatggtggtaaccagaaaaagtatttagtaatcccggatcatgatcgtctcattggtatccagggagatttagcaccacaaacagtcaagggcgtctgtgccatttgccaaacaattggcaacgtcgcactctttatgtcgacaaccaagtcatctggtctcggaccttacacgcgtaacggcaattacatttgtcgtgacagcaatcagtgtaatcgacaattgaccaacccgcaggctttagctgactttttagcagttgtccgtccaaaacgataattaaataaaaatcagggccaccaagaacagctgcaactgccgttcttggtggcccctttcattaatcttattcggtgacactaatacaataagcgcgtgttggcgaatcactaacttcaattcgcagcagttgcgccccgttgtctcgcaatgtcttatcaatcttggtaaataaatactccgtgacattttcaacagttggattaacagttttaaattcaggtaagtcgttcaaaaatttacctgacaattcatccaacgcttgatacaagtttttttcaatatcgtaaaaagcgaccatcgcatcaaccgtgtgcaattcacaaacaatttcccacgtgtgcgtgtgcttttttccggagccagttgcccaccgcaccgcatggctagcgttgacataggacttaattttgtacgttcgttgtttagtcggcattgcccagcctcccctatcaggttcaagttacccttcatcttagatgaaacggtgtcggttggcaatagtgtctgctggtaaacagctggttttctgctgcaaaagtgagtctaaattagttgataatatgcaaaacttgcggcgtagcaactcggtcagttcgaaattgatttaacggtttttcaggcttctcatagcctaaagcaatccccatcgccactactttattcgcaggcatcccgagtgcatttcgtacaatggccggatatttaaccaattcataagatggtactgactgtactccgcgagcagttgcggccaacattaacgtctgcgaaaaagcgcctaaatcatagattgaccaactattagggttagcgtcgagtacgagataggcaatcgccggtgcgcgataaagattagcacgactatcccaataagtggtcgggtctgagtcgatcacgggccgaaaagttccgacccagtgccccatattttggctagcaaacgccgaaaaatcaccccggtgtactttggcgagatcagcgtcttccgcaatcccttgctcagcggcagtagcatagtgttgtttaatattagttagtgcgtgccccgttgcaatatagacttgccatggttgtgaattgccccacgagggggtatccgtaacaatcattgttaataactgtggctcaatagggtcgtctttaaaagcccggactgaatgccgggtgtgaatcgctttaattgtttccatgaatttttagctcctatattttaaatagtgatgaacaaagagaataaatatcattataaaagatagtaatatctttttcaagtgagaaagcttggctagctaagcgcatcgtcataaaccagtaaactaaaaacgtggtaataccgagccattcatgctcagtattaccacgtttttaaccaaattaggcccttgaagttacagtcaacaagctatgaacactggccttaacaaggctgtcatagaccttattttaatgcaatctgtacccgtcgttgaagatctggcaccacggtcgcttggaaccatggattcttcttttgccagccataatttaggggcgatggatgcactaatgggaaataatcaggcaagtaatcctgataattttgaaccgttgcagtcaacgtcttttgccgtgaacgtcctaaataagccttaattgcatattggcccacaagtaacgtcagttgaacgttaggcatcattgctagcagcggttcatgccatttatccatgaagcccttgcgcggtggcaagtcaccgcttttgcctttaccaggatagtagaaatctagtggcataactgaaatgcggtcactttgatagaattgctcccgcgtcacgcccatccaatctcgaagtcggtcgccgctcgcatcattgaaatacgtcttggtattttgggcaatacgtcccggcgcctgactaatcactaaaatagtggctgtcggtaacacatgaaataatgggtcccaccccttcgccgtatattcagcgttatcgggatcagccttgatagcttcagtaatttctttgattgttgtgatatagatgcacctgcgattcgtttttagttttagtgacgatacttttcccatgcctgtttgattaagctcagaatatattcaatctgagtatcatcttttataattacttcataatctccatttccccaatggccgatactgctaacatctctcaataaattattgggatcgtttagttctccttttgataagttaatccaaatttttaactggcttttttgcggtaacaaatcaaccacattatgatgtttaatacgtagtccgatgtaaactttggtcggtttaacttcaaattctgaatcccacagcaaaatggcggctttaagctcatcatacaagtcacaaatattagcagtagctttatctaggaacatttcctcagtatagggcttcaaatcacttacctgatcaacatccgctgctttcgagattactttggattgtgacgataacgcactaaccttattggcaaaacgactattttcactattattcataatttgaagcagagtcaaatagccattctcagttttcctagcctcatataactcaattggcaaattggggttatcgatagcatctttttgataattagtataactaccagcgataaaaacaacccgtgtttgtgtccagtcaaagtcagccactcgcgcccgtgcaccaagcttttcattgtaggctaacgtaaaatcggctttatgttgcaaaagtgtgtttaaataggcagtgccctgatcaactacgctatccttagacgttcgtttatattcaatgattacgaaagctcgaacctcactatcatacgccactgtatccaaccgataatgacctactgtaaattcactgacaataaattgaatccctaaaactaattctaaattattttcaatcaaatcttgtaattcacgctcaatattaaaacttgagaccctaaccttatttaaactatttttactttgatttattttgtagagatccatattaactcctaatcaatgttcatacttatactagtattttacatcaattagtcatagacacgaagaaaagtcctaaccatgttattgccctagattaaacacgacttcatagtcccaacattcgcttcagcagcttttcattacgtttattatggatcggcaccattaagcgcgtagtatattttgccaaaacaccttgcttatacacagatttttgattactaaacgtctcaaagcccgtcttaccgcctttatagcgtcccattccagaataacccacaccaccgaaacccattgaatgcgaacccgcatgcaaggataactcattaatatctactccaccagatgatgtctgcgaaataatttgattcaaatgccttgaactcctaccaaataagtacatggctaacggcttttcatgagagttaataaaagcgatggcttcatcaagtgaatcatacgtaaaaatcgataaaataggtccaaaaatttcatttctggcaatctgtaaatctcgatcaggattaatcgccaacgttaatggaattagccgtcttttcacgtccgtaaccaattcattatttggattaatcgttatcagcctagttccccgttgccgagcttcagtaagcattctcaaaatccgatcgtaagaacgatcgttgataatggcagaatattcagaattattaatgtaagttggaaatgcttgcgcaagttgtgcagtgattaagcgcacgtattcatccaactggtcagtgggaagtaacacataatcggtgtccaaacaaatctgaccactattaccagaacgactacgcgcaatcttggcagctgtcatttgcttgttagcatctggtaaaacaacggctggatttttaccacccagttctaaaacaaccggtgttaaattaggagccgccgccgataataccttcttaccagtttcagagccacctgtaaaaactagtttgtcccaatccagtgctgaaaactgagccgcaatatcagcttctcctgtcactactgcaaagttcttttcatttaaatactgttgtgacaatttctggaccagtgccgctgtcttaggggtatactcagagatctttaccatcactcgattccccgctgcaatcgcttctaccgctggatctagcgcaagatcgattggtgcattaaacggcgacatgataccaactacacccaatggttcattataaacatactgtttagttccagttaatgccatcaaacccgaccgttgcttagctggtagtatccatttacgaagatgcttcttaatatatgcaatcgtcgctagtggtccggttaaatcagcacttacaatttgtagcggatcacgctgcccaaaatctgcttgaagtgccgtgattaattctgaaatattatcccgaatcaatgcctcaatctgatttaaaacagtcacacgctcttcataggtcattggttgcgcacggtcatactgtgtcttttgcaagttaaaaatttggtgcatctcattaattgtagtcatcatagctctcctttttaatcgaacaatcgtttaattatagacaaaaaaatatcatgttctgatattttattttttcaatagtgcattcatacacatcacaaccacttgatcgatcataattgtcttattatcaatttgacgtgtttttaaggctttaacaaacaaaacaattggtgcataaacaaaacctaaaataactgctggtgaagaaatgacaaattcaggtgtatgtttgactgcttcaaaaagttgctcgaaaccttgataggattcctcctttttgatttttaagctatcaagaatgggcgaattattgaattgttcaataatcattaatgcttcgtaatattgcatgccgaaatcgtataacgcatacataaactgttggacaaacttaactgagttattgggtttggtattgatattttgacttaaaaatgctgccaactgtcgctttttagcaaggtagacctgttttagaagatcctctttatctgaaaaataaacgtaaatagttgacgaagaaataccactcgctttggcaattttggacatcgaaacatccgcaattccctcttttagaataatacgacttacttcatcgataatactcttctctttgtctaaatctttttcccgcatatttggcaccctcttttaatcgattgaacgttcgattaataatataaaactatccctaataaatgtcaattaaaattattagaaattttatggatgtggcacctgtacgcaaaaaatcactagctatatatacctgagaatctacaatcagcatcttggggattgggtatactcaaaaacggcaagcctttttgaggagcacctgccgcttactttgctattatcaatcaattgagtatagtgataaccaggctatttcaatctagccttaatatcagcatctgaaaaatcgttgctaccgtccttttttattttgccattatttaatggtaattgcatatctatatactgcttacactttagtaaggtaactgtaattctttgcagccttatctaaactgttataaatacgaccatcaaaaacagattagaattcctattcacctaataaatccgtaactattgaaaaacaaattttagcatcacttatggtacggacttcccacattaatcataaacgcccgataaacctgctccgacagcactaaccgcattaattggtgaggtaacgtgaaacgcccaaacgaaatctgagtatccgcgcgcttcagcacttccggtgataatcccagcgaaccaccgattacgaaatcaatatcactgtgaccatacgtcgttagtttatcaatttccgccgcaaattcttcactcgagcgttctttgcccaaaattgctagcgcgtatacgtaatcgcgatccttgatcttttctaggatccgttggccctctttggccttcacattttccatctctgcgttacttaatgactctggagccttttcatctggcacttcaacaatctggaattttgcaaatttactcattcttttcgcatattccgcaatcccctgtttgaagtatttctcttttaatttcccgacacagataattttgatgttcataattgaccgcctttacacaagttattaacatagttatccacaggtgcataactcaataatcaatatattgtgttgaacaccagttcgccacaatatttatttagcctcgttttgtcaagacctttccgacttatccacagttttgcacagcaacacttgttcgtggattccggttacaaatcctattatatcaagaaccgaggcctattaaaataactttttaaaattaaatccacaggacagtccggcgcctgtggataacttttaaacaagcttcaaccccatggttccggctgttcataaatttcgactaacgcgactaaaatttatcaccaaagttgtccacacttttgcacaccatcaaattcgacaataaatgctttctgctatttcaaccagtttgttcggcttttgtcgcaaccattgccagctttcgcaaatttagtcgattattgaaaatcgattcttcgttttttcataatttcggctactaacctaaaaaaacgcccccgactgctttatccagtcagggacgtttatgaaattctcatttattagttactttgtttagttaacgttttggtagtttccgtcaacttcatgttggctgtcttgagttttccgttatggtagtatttcaccgtcacggtatcattaaccgaatgggcatacagggcactccgtaacgtggctaagctggtcactttcttgccacctagctccgtaatcacatcgtacttcgttaacccagcagctttagccggtgaacctgagtacgtcttcatgatgacgacacccttcgtcacactggttggtaacttaagaacagacttctgatcactagaagaaatattggataggtcataggttgcaacccctaaagccggccgaacgacttcacccttttgaaccaattcattgatgatcttcacaacttcattacttggaattgcaaagcccatcccttcgacactagtcccagaattatctgaggccaacttcatcgagttgatcccgataacttgtccagcaatgttgaacaacggaccaccagagtttccagagttaattgccgtatctgtttggataaccgtcgcgtaccccgtcgtttgaccagatgtattcgtcgtcgccacggtccgcttcttcgctgaaatgattccttgcgtcaaggtcgttgcgtaattagagcccatcggtgacccaatggctaaggccgtttcaccaaccttgatattatctgagttaccaaagctagccgtcttcgttactttagaagaattgattttcagaacggccaagtcagtcacagaatcggttccgacaattttagctgacaacttagtcccatcactcataatcactcgaatggcacttgaaccactcaccacgtgattattcgttacaatataagccgcgtcaccgctcttcttatagatcaacccagaaccttcactgtactcttccagcttactagagctagaatctgaactggatgaactatcactgccagacgagtcatcgccacccaaaataccactccaactgcttgaagagctcttcttttggagattaatgaccgatacaacggccgccttgttattttcaaacaccttggtcgcctgtgaactgacattgaccttaacgttcgtcgttgacgttgaccccgatttattagaaccagttggtacactggtcgatgacgttgcgatgttattgttttggaaataattaataccgccgtaagcaacaccaccaccgattaaaccagctactagtgcggttactgcgactttgattaatgatttattagccataattgcgcgtcgaaacgcgatccctccctactaatgcttattttaagtttattttagcgaaaaagtgtgatttttttatgactgaagcgttgtgaaacattaaagctaacctataacgtaattaacttagtcgcttgttctggctccgtatcgtacaattgaaaatcatgctcaacgtcaaaatctcgttccgtcatcatggaagcaaccgttaaatgcgccaaggacttcaagttattatcctgactacgatgccctaagtaaatccgcttggtatgccggccaatcacatccatcaaggcgttcgcaccatcttcattcgataaatggccctcatcaccaataattcgctgctttaatggccatggataccgacccatccgcaacatttctaagtcatgattacattcaaataaatagccgtcagcgtctttgattacaccttcaacgtgctctgaaacgtagcccgtatccgtaatgatgacaaacgattttccggcatgatgtagttcataaaattgtggctcggccgcatcatgtgacacactaaatgattccacgtcgagatcacctagtccaagcgtcgtgttcgggtcaaagacatgacataattcggcaggaacgttgccgattttatgcgccattgcgtcccaggtcccctgattagcataaacatccataccatacttccgcgctaaaatccccgcagaatggcagtgatcagtgtgttcatggctaataaataaactatcgacttcattaatatcacgatcgatcgacgccattaaattagcaatttttttgccacttagccccgcatcaaccaatactttgtgctctggcgtttcgatgtatgtcacgttacccgtactacccgatgccagaatgcttactttcatatcatccgttgctaattttaataccattatttaggctcttcctatctctgaaatccattactatcttcatatgatacacgcttttagcggggttgaaaagcaagccacctgcaagtgctcaaacttaacgtccacgactatcgccatcacgcggttagtctagtttactgtcgtgtatgcgcacactagtttaccggccattaaactcacacgaaaccgcgaacatcaacgctgagcaatccacgctacgtcatgccacctcgacattggcgtatcacaactagtcaaaaatctagtcaccaaaaaacgggcctgttaggaaaaacacccttcttcacagcacccgttattcgacaacgacacctagtcgttaaactggttttcactaatcaattgcattccacatcattccgaccgtcgcatctaaactactcgtatcactagccgtactaccgttcttcattgaagaaccagtaaaggcattgatacggtgcagtgtaacgttagaactattcttaccccggaccgcaaagatccacgttgggacgtaaacactactatccttcaatttcaataaccgagaatacccaagctttgcccaaacgatccgggaactacttgccacctgattatattgatacaacgcaaccagggcctttttttcactgatcgtaacagccttttcgcgtaaagttttgacgtgattgacgtacgtctgagtataacttgtcagctgcttgtttttattaacaaataggtggacttgcccagcgccagtcatgatctcgccatccgcaaccttttgaacaaaaacgtaatcgccgttagacgacaaatccgcatcatagacgtactcggttccatggattacattggtccgctgactcataaacgtcgtcaagtccgctttaggattgcgggtatcgatagtggtggttgcccgtagtgtgctcacgagcttaccgccgctttgcacctgggctgtctgttcagttaactgactcaacaattgtttgagaccactctcgttactgcccgcaatatagtaacccgtcccttcgctcgtgtccgggtttttaaagctaatattatctgcgcgcatttcacgaattatcgtggtcgccgtatcaccagtcgtttgtgtcgacttagagctcgtttgcacgaacataaaacccaagaagatatctagaacaacaaatgctagtaggaaaatccactcaattctccgaaaattcatgcggccacctcctaagatccacttaacatcgacgtatatgtccgccaagtgccattatagtagacataatacgtcggcgtcaggtcgatcacgagtttggacgacttgttctgtgaccattcgtagccaagttcaatactgccaattttactgtctttataaccagcggccttcagacgttttaacacacttgtcgaactcggtaaggtcaccgcttgcttctgaccagtagttggtactggcacctgcaaactgtacagtgagaagtagtaacggtctaacccgttagaagtgagctgaatccggacatcgccattttcggtctgattaaagatcgggaacccttcaacatagcttcggtaaatgacactattactcgttgcgtcaaaaccgtagtagcggatattatccattgggacaccgagactagttaacaaattgaagctcttctttagctgattagtcagtgataggttccgcgtggttcctgaatcactataatcttcgaaatacactgttcctagcttagaatccaccgtcatgcgcttgtaactacccgttgtatactcctgtttaccactgcgattatgcactgaaacggtcgaattaccatccgcatctagtaatcggttggcaatctcactcgcagccgctttactcatcaagtagctataatgttgcatcgtaacttgctttggataatcaatatacgttgtattatcctcataggtcatcttgacagcaatccgtttgaccttgtcgactgccaaaacttttttcaacgacgacagagattttttcttcaaccgaacactataaatctcatgatggtcatcattcaaaaagtagatgtgattcgtatcattgactggaatcacgatccgactaaattccgaggagcgaaaattactgagatgttgcttgaagaccgtattaaacatactgacagtaatactgtcaggaaagttcaatacgtacgaatcagttccatttaagagcgcacggtagctttttgccgacgtaatgcgaactttagagatactccgcgcatcccatttgcgtaactgctcactaaattgactgactaagctgacatttttattaatcagcagggattggccaccctgactgttagtgtgaattaattgtgtcggtaaataaatatcatcgattgtccgagttgtcaacgaagagttcgatgacgtcgtactaaccttgctttcatgctcatagcgtgacggattcaaccagatatacatggataaaaccacgctcaataagatcagaatcgtcaataaaatgggtaagataaagcgtctaagcttgtgagtcgtcatcccaaaggtcctcctcctcataaggttcgtatggcagggagatatagaacgtagaccccttaccttcaacactatcaacccaaatacgaccgccgagcatctgaacaacttcttttgaaatcgccaaaccgaggcccgtcccaccttgggcccgtgaccgcgccttgtcgactcggaagaatcggtcaaagacgtgtcctaagtcggcccgtgggatacccaagccctgatcactaatactaatgatcacttggttatgcgtctctaacaggcgacaagtcacgacaccgccatcaggtgaatacttgatcgcattattcataatgttatccaatacttgagtgaatttatcggtatcaatttcaacccacagatcacgcttggtaaactcgcgcttaatagtgtaatacttagctggattatcatccttctttaagatcatatcaaaccgatcaagcacgtaattgaacatctcattaatattgaccaattccatatcgacccgggtggtccctgagtccatccgtgatagacttaagagttcattgatcattcgaatcatacgatcggtttcttcttgagtgaccttcaaaaatcctggggccacttcaggatccttccacgctccatcactcagtgcttcaatataactccgcaaactagtcagtggtgtccgtaattcatgagacacgttcgaaacaaattgtttccggtcattatcaatcttttgttgttccgtgacatcgtggagcacacagactaacccactaataaacccagactcccgttgaattaacgagaagtaggcattcaagattaggtcacgctcgttcgaagaaaaatcaagcatcaattcatcttgattttcaatcaaatcacgcaatgaataatcatcacggattttcaaaatatctaaaatcgagttaccgattgccttttcggccgtaacatccataaagtccgaggctgtttcattgatgatggtaatattaccccggcgatcagtggcaatcacgccatcactcatgtgtgagagcacactatccaaccggcgccgctcagcttctgtcgactcttgcgattcttccactcgaatcgacaagttattaatggctttagccaactggcccaactcatcatcgctataaactcggacttgccccgcataatcaccacgggcaattcgttgcgtctgctgcttcatttcttcgattggacgagttattgcccgggcaataatgattgcaattcccagtcccaagaccatcgcagcaagtgacgcaatcacaaagattcccataatgttgttaatcgtactgtagacagacttcatatttgcccgtacatacagtaccccaactaactgactgctattacccgctgaattggagctatatagcggcacgattgaaacgtagtagcgtccattattctgagtgtcataggtacttttagtgtaagttcgattattatagatcgcattcttgacgtttcgatcggtcgttttttgtccaactactgactgatcattaacatcactcgtcccacgaattgttcctttgctgtcaacaacttggatttcatcaacattcgtattgttgtagttcgacaaaatcgtcttgatttggccgttggccttgcgcgtactgctgacggtcaattgttcggacaacgaattatcaatataagttggaatttgcaccgactgtttaaaatcctggatgttctttgattccaactgtttcacaaagattgcacccacgatttccaacgtaatcaataatagaagggcaaacacgagcgcaattttgaaattaattgttttaaaaaaatttttccgtttaaatctcaacacggtttagcaacctctactcattttcaggattgcggagatagtaacccacgccccgccgcgtcaccagccattttggatgactcgggttatcttcaactttttcacgtaaccgccgcacggtcacatcaactgtccggacatcaccaaagtaatcatagccccagaccgtctgcaacaagtgttcccgcgtcatgacttggccgatatgttgggctaagtaatgtaacagttcaaattcacggtgcgttaattcgatgttttcaccgcgtttggaaaccatataagcttctggatgaatcaccagatcgccaatttcaatgtctgaattttcttcaacttcagctggttgagcacttggtgcaccttgccgccgtagatttgctttgactcgagcaacgagttcccggtttgagaacggtttggtcacatagtcgtccgcgcccagttccaagcccaacaccttgtctaattcagagtcctttgccgttaccatgataattggcatatcatagttcttccgtacttgtcgagcaacttccaagccatccatcttaggcaacatcaaatctaacaaaatcaaatcagggtggacttcatccactttttgtaaggcttcctctccgtcagctgcaacgtgaacttcatagccttctttggtcagattaaatttcatgatatcagagatgggcttttcatcatcaactactaagatttttttcataacgattcttcctccttaggggaaaacaggtttacatttcaatttttagggtaattcgcgatatattacgagaaaacaggtcctttctcgtgtcagggttggttgaaactaaattcaacactggttttagtatatcacaaatgtagttggctttctttgattgctaatccgcgtggccgtagtatttcccgggaaatcatttgccagttcaagcaatcgttttcaccaattaattactcaaaaaaacacttttttcgaaaaaactttcgaaatagtgttgtcagaactcaaaattcatgatattatattttttgttgagttatgggcagttagctcagctggcagagcaacggactcttaatccgtgggtccagggttcgatcccctgactgcccatcatataaccacactaatcagttttcacgccgtgataatccaccgtgaaagctgatttttttattcctacaaaaaagcctcaggaagcacaacgcaaagtgcgtgtgacgtccctggggctttttctaacgatctaatgtttaccatcagcgtagctaagtaactcaattgctagggttattcttgatcaatatggaaataaccttcaggagctgcactcggctgtgcttgatgccaatgttggctactacttccatatttagttggttgtggatccggtcccattgcaacaaagcgccggcccaatgcgtccataaaaataacgacccgctgatattcacgcgcaggtgcaactaacgtacaattctcatgcttaatgccgtaaacatctacaaaatccattccgaccacttagctttcttgtttagctgacaacccgtcacttcaaataaaaaccgaaccagttaatgataatggttcggcccaacagttactattgtggttgaacgttcgttgcttgggggccacgatcgccctgttcttcatcataagttactttttgaccttcatctaaggttttaaagccatcagtttgaatcgctgaaaaatgaacaaagacatcggtaccgtcttcacccgtaataaaaccaaaccctttatccgcattgaaccattttactgtaccattcttcattattagataagtcctctcagaactgactgcagtaacaacatcgttaaccttgggagcgccaatcaatcataacgttccacgcgttaagtggcttaagtatatcacatccctagtttttaatcgctgaaaacggtgtgcataacgtatgactttcccccatgattcctgcatactgaggtgtaaaggggtgactaagtatgcaacacacgactcgtcaggcagccctacatatgatccaaaccgcccccgtcttcacgttagcaactgttgatgcggacggctttccgaccatggtagcgctcagtcccttacctatcaaacggagcctagaagaactttacttctatactagtcgtcaaacttcaacaacgcagaacattcaaaactggcgtcaagcgagtttattctattaccaactgtcagactatgcgtcaattatgcttcggggaaaactctcattagtcggtaccaacgtttttgaacaagattggcgggctgaactaacggactttcagcagcaactaaattacaaagaccccgtcattctcaggtttcagacaagttcaatcaagattcgccagatgatgacgatcgaccatctcgaactcgttgatcagcccactgacggccccgctcacttagattagccgttacaaattgggccttctcagaaagacacaaccgaagcgccacgactagattctacgcaaattctagttgtggcgcttcgttctttggtcacccaacaactagcatggctcgaagcgtgatatcactttcaaaccagttattaatgcaagcacgtccgactattccggacgtgcatcaaagaccaagtatcatcagcacaagccagaacactttgttcattcaccttcgaaaacaacgccactttcaacctcgtcagcccctactttcatcaccaatatttgcgagtcttgtaaaaagagactaggctgtagttatggttaatatttttatatttaggattacttattgcaatttttaatgaccgaactaaggagtgtggacttatgaaacttattagattgcgaattgaaaatgacgcgatggatatcgcttatcatccagtatcggggcaagccgcaacggcccattacctgattgcctataattctgaccaaacaattggtgaaaatctagagaacatcaaggttcgcttagccggacttcaattcgatgctgctattcttgaaaacggactgtcctatccattctcagacacaatcgtcggtgtcaactatgatcgcattgatgtcgggctagctttgactaatttgcttaatatcccagtcgttagccaagctgccgttgatcaacttggactagcagccgcagttaaagctaaaagtgcctatttaaaatggcatttggattactacggccaataccacggtgtccgtaataatggtcaagaagccatgttgaccattggtaacggttattttggtctacggggcgcctttttggaaagtcacgccgacaaggacaattatcctgggacatacgttgccggggtctatgatcaaaccaccacgactgttcatgaccaccaagttaagaatgaagatttagtcaatttaccgaacgctcagttcatgactttcggtattgatcatcagactccctttacactcaacgaacatgatttacaagacgcttatcggagccttgatttgaaaacgggactcttgacgaccactaaattgattcagctcgcttccggacatcaactcagaatccggtcgcagaaagtcgccaacatgcgtgattggcaccgttacagcattcgttaccaagtcaccccactcaactttgcgggtagtctacaaatctataccgaaatcgacggtagcgtcgtgaatagcaacgttagccgctataacgtcttcgatcagcatcatctgaagactatgggtatcgaaacggctgctaataccgtctacctttctggtcagaccaaatcatcacatatcaattacacaattggggccaaactaactagcccagacgttcctgccattgagaactttaatagcacgcaacaacctcagggcgttcagcaaaccgtttcactggcggtagaagctggtaaaacgtataccttcgataagaacgtcgtcattgaaactagtaatgaccatagcgatccccagttgacccacgtccaagccgagctcgaccagtccagttttgacaatacggtaaccactagcaaggactattgggaagcgacttggcgagccacagatattaagatccgtggcgatattacaagccaacgcttactgcgcgtcaatatttaccacagtttcgtttccgctgccgcaattgaaagcggccaattagacgcttccgttggtgctcgggggctccacggagaagcttaccggggacacgtcttttgggacgaaatgttcattttaccattctacacgttgcaccgaccggaactagccaaacaactcttagcttatcgttaccggcgactaccaatggcgcgtaaaaatgccgaagcagaaggctacgcgggagccatgtacccctggcaatcagcatccaagggtgatgaacaatctcaattcactcacttaaatcccattactaaaacctgggatccagataatagccggctccagcgacacgtctcgttagatattgcctacaacgtctggttttactaccacgttactcaggaccgtgatttcttaactcattacggtatggaaatgttgctatcgatcgcagccttttggatcagtaaagcagattatgaccaagctaatggccgttataacattagtggggtcatgggaccagatgaattccatgaaaactatccaaacagcacgaccgctggattgaagaataacgcctataccaatatcatggttgcgtggctctttgacacgattaccacgcttcgggcgcagatgccccaagctgcttttcaagcggcagctcaggccgcacaatttgactcaacggctgagcaagcgttaacgacgatcagtcatcaattaacacttgaaatcaaccgtcggggaatcattgctcaatttgaggggtacttcaacctaccgacgcttgactttcaagcttaccggcaaaagtacggtgacatcgcccggatggaccggatcttgaaagcagagtctaagacacccgatgcttaccaagtggccaaacaagcagacgccttgatggccttttataacttcgatgtcacaactgttcagaagattattgaaaaaatgggatatcaacttcctaaagagtatctgacccataacattcaatactatttagcgcgcacaacgcatggttccactctctcgcggatcgtttacgccgttttgaatcagcttgacgataatgacgatgacgcctggaagcttttctcagaggccctcgcatccgactattacgacattcaaggtgggacgaccgctgaagggattcacctcggcgtcatgtgtgcgaccttaaacctgacgacacggaactttggcggggtcaatccactaggtgcccacttacaggtgagcccacggctacctgaacactggcaaacattgaaattcaagcatctctttcggggtgttcactatgttttcgttatcgatcatcaacgggtaaccgtcactgcggaccaacccagcacgattatgattggaaaacagcattaccaattacaagctaagaaaccactttccgtcacttataccgattaatctaggaggcaatcaacatggttaaatttgcagcaatcaaggggtttgtctttgacctcgatggcgttatcacggacacatctacttttcatagccaagcttggcaccagatcgccgataaagtcggggtcagttggaatgatcaattagctgacgcgctcaaaggtatcagtcggatggattcactcaacctcattctagctcaagggcaccgagaaaatgacttcacaccggcccaaaaacaagcgctagctacggaaaagaacaccaattatttgcagctcgttaaccaaatgaccccagccaacattctaccaggcatcaccgcctttttgactgaattaacaacggctggctacgcattgtcactcgcttcagcatcaaaaaatgctccgcttgtgctacgtaaactcggtcttagtgactactttacgaaggccgtcgaccccgctagtctcaaacacggtaaacctgatcccgagatttttcggcgcggtgctgagattttaggccttaatccagctgactgtattggtgtcgaggacgcggcggctggcgtacaatcgatcaaaggcgctggcgaaactgccatcggtattggtgacccgaccgttttagcggcggcagatatcaattttaccgatacgactcagctcacactcgccaatattaaggcacaactaaactaacgtatttccattaaactcatcacaaaacaaaccggatttggcgaccacgtcatggttaccaaatccggtttgttttgtttaagccagtcgctaatctcaccagttggactgctcactggaagcttataattatcagactagctgtcaattctcaaatcaaatcaaaatgttgcaatccttgggcaatcccgccgtgcatgttgtcagcggtcacgtaccgcgcgagttgtttgacctgcggatgaccattgcccattgcaatcggtgtctggatcattcggaacatctcaatatcatttaattgatcaccaaacgcataggtcggtaccttagttaaatgcgccttggttaagatatcctgaattccaaccgccttggagacgccccattgcatagtgtccagcgcacgcggattattacgaacaaaatgtagtcggcctcgatatcgctgccgatattgcgccgcattcaacggatcaaacgtcagtaagaaattaatatgttgatgttcaaaaaagtgcggtgcgacccgggccgtctgtctgagtgcccgataattactggttgtcaatgcatcacgatggcttaacgcaaaaccggcgttattataataagctagcgcattctgttggcgattggcaaaatgagtaatatcggtcaaaagctccttatccagttcgtgcgcactcaaaaactgcccttgatacgcgacgtaactcccattcgcactgacgattgaatcgatccccgtcgttgtcatcacatcttgaacttcgaatacattgcgacccgtggcaatgacgggtaggacgtggttagctcgtaattgctggattgcccgcacactgctggccgcaaccgtcttatcgtcctgcattaacgttccatccaaatcaaaaaacactactgcttggtacaaccaattaccccctaattaatcagtcactggccaataaccagcgccaccaatacactaattaccttcgtgatgacgtctatttaaaaccatccgaaaaggtgctttagtgtttacctttattataagcacctcgtctgaacaacgcagacattctgcttataagcgcacaaaaatgcgtggccaatcaaggaaagccacgcactaatgtgcctacgtctcattaaggatcgatgagtacttcgtaatacataatcaatagcggggtgctattaaaaagtacaattatactatacggctgaaccgtactaacaatcatcaagttcctgtaaaatttaggtaaagttttcaataaggcgcaactgttcaccacccagcgtctgcgtcacaagggagcgttgaatcgcttgtgctaattttatgggcacaccactcaactttaaatcgtgactcgtcatggttcgcggctcagtagtcacattgacaatcaccatcacggtctgatcagcctgccaataaaggtagccaatgccataatctgccaagtaaaacggcacaaagtgggctgtgtttaaccacgggtgccgttgacgccaattcgcccagtcagcaacaaactgaacttgcgcctgatctgcgtcctgccacggataaaacgcacggttatcagggtctttcccccccatcatcaacgcctcatcaccgtaatacaggcacggtacacctggaagcgtcaagagtagttggacggccaaacgtaggcgttggcgatcttcggctaacatagtcaggattctgggcgtatcatggctaccgatgttattgaagttaaagcgaaacgtcgtagcgggataattttccttgagggtcattagttcacgccaccattcggccggtgttagcgtgccgtttaaaacgtgaataatcaagcggcggagcggataattcatgacagcctgtaagccgccgccctctaagtagtgccggcgcatcccatacgctaatttatgagaggcatcctcccaaacttcaccgatcaaaaccttatccggataacggtcaagggtccgtcgaattccagcaatgaaatcgtctggcaactcatccgcgacatctaggcgccagccatccacaccgcgttgcgtccaatagtcaatgaccgaatcgggtttaccaaagataaaatcgcggtatgttggatcgtctttatcaactgtcggcagatcacggatgccccaccagctatcgtaatcgtggggataatgaatgaatgtgaaccacgggtagtacggactcgtggtcgactgagttgccccaaccgtcgggtaatggcccgcctgattgaaatacttagaatccacaccaacatggttaaaaacaccgtctaagatcagtcgcataccggcccggtgtacggccgcgaccaggttatcaaagtccgtcaaatcgccgacgaccggatcaatcttcagatagtcacccgtatcataccgatgattactgctggcctcaaagatcggcgtcagataaataattgtcacaccgagtcgctgtaaatatggaatcttagcactaataccgcgcaaattaccaccgtaaaaatcccagcgtaaaatcgcccggtgttcatcacgcacgtatagtgggcgatccgttagttgaccataaataaagctatttggcttgggcgcattaacgtggccatccgcgttgccattattgaagcggtcaacaaagatctgataagcaaccccttcacgataccattgtggcaatgtttctactgctttcaagattgtcaattgaacatgctcgcgcaagacgtattgaacgcccgggccaccataaccaccatcaacgcaaccataataagcggtcatggtcgccgtttcaatccgaaaatagtagaagtacaggccaacctgggtcggtataaacgtggccgtatacattgtgggactgattggatgtaacggtaaggcctgttcatcatcccactgaccatcatgagccacgcataaatcaatctgcttaaccggcgttactgtctgaacactgattgtgaattgaacgggtgtctggcgggtcacggcaccaaagggtgtcttatacgtgggtaaaaatgagttatacgttacctgcatccgtcacccttcctttcttaattcagtcgttcgtggggcacttgccaaatatcgtcagcataccgcgccactgctaagtccgcggcaaagtgtcccgaagcggcaatgttggctaacgagcgttgttgccaagtgggttgattttgaaaatcacgactgatctgctgttgttgggtgacataagcccggtaatcggctaagacaaagaattcatcattataccgcagtaatgaatcatagatttcccgaccaaccgttggaattcccggaatcgtgccatcaatcaaactatctaagagccgttttaattcaggatcagcatcgtaaaagtcagcggcgtgatagttgccgcgatggtaatagtcgtacacttcattgaccttaagcccaaacggatattcattttcagcacccgccgcttgcataatgtcgatattcgcgccgtcatacgttgccaatgataatgcaccgttggccatcagtttcatgttactagtccccgacgcttctttggaggccgttgaaatctgctcgctaacgtcggcggcgggaatgatcagttcggcaatggagaccccgtagttcggaataaagacgatctttaaccgatcaccaatcgccgggtcctgattcaccatgtcagcgacgacattaatgagtttgataatcgccttggcatagtgataactaggagccgccttggcaccgaaaatgtgtactcgcggcacgactggctgttgcggatgatccttaatggcaaaatactcgcgcaagatttcaaagacgtgtaggagttgccgcttataagcatgcaaccgtttgatttgaacatcgtaaatcgcgtcggtgcgaatcttgatccccatagtacgctgaacgtacgcggctaaagcttgcttgttagtcagtttaacttgacctaactggtacaaaaagtgatcatcttgttgatacggcagtagcgtctgtaataaatctggttgccgccgccagtccgaaccaatcgtctgatcaatcaattgcgctagtggttggttcgccaattgaacccaccgccgggttgcaatgccattcgtcttattattaaaccgctccggataaacttgatacaggccccgtaacacatccgttttcagtaattccgtatgcagtggcgcgacaccgttcacactgtgactcccaatcacagctaggtaggccatccgtacttgtccgttgcctaaaggcgccgtctgatcaacgagcgctttgccaaaaatcggcgtttgttgttcccggtagcgccggtcgatttccgcaataatctgatagatccggggtagcaggtttttaaacatatcgattggccaagtctcgagggcctcttgtaaaatcgtatggttcgtgtaactcatgacttgcgtcgttaacgtccacgcgacttcccatgaacagtgatgttcatccattaatagccgcatcatctcagggatcaccagcgtcgggtgcgtatcgttaatgtgaatcgcgacctttttgcctaacaatttgatgccatggtgcgtcgcacaaaaatcacgcacgatactttgaacacccgcagaagagaaaaagtattcttggcgtaaacgcagttgttgcccggccgagttagaatcgtcaggatacaagaccttggtaatctcactgattcgatcacgctgatcctgcgaagaataggtcgcactgggtggtaactccgcggaccacaaacgcaaggtgttcgtaatatcgttgtgatacccgacgataccaacgtcgtaaggaaccgctagcacgtcttccgtattttcagattgcggttgtaaactaccatccgcttgcggttgtaaccacacattgccgccgaactggacaatgcagctcttgttatcgcgccgggtctcccacacgttgccatgatggagccaatcatcgggtaattctacttgatagccatccatgaaaacttgtttgaacaagccgtaacgatagcggatgccgttaccgttgccggcaattttcaaactagccatcgcgtccatataacaggctgccaaccgacctaatcctccgttaccaagcgccggatcaggttcagcctgactgattgtctcaaagtctaagcctaattccgttagccctttttttaccgtcgtcaataagttgagattcaacaaattagaagcgagtaagcgtcccggcaagaactcgatggaaaaataatagacttgtttctgatgatgatcgcggtaaaatttagctgttcgtgtccaactctgactgttatagcgccgaactagctgtcccagtgcaataaattgcccaatcgtcgaggtgtcactcagcgatgttgaatacaaggtctcaatttcacttagaaagtcctttttaaattgcgcacacgttaatttcaaattcacacccccatcaaacctaacgcattagcttctgataagtcgcacggtactgctgtgcagaatgttcccagccaaaatcacaagtcattgcttggtgctgcagctgccgccaaaccagtggatgctgccgatataaggtcacggctagaaccataattttacgtagaaccgctggctggtagtcgtcaaagctaaagccggttccctgatcggtatagcgattgtacggaatgaccgtgtcccgcaacccaccgaccgcgtgcacgatcggtaacgtcccgtaatgcatcgccatcatctgcgacaagccacacggttcaaaggcagaaggcataagaaagatatcactggccgcatagatttgctgagctagctgcgtatcaaattgaatcgcggcgaccaccttttgcggatacgccgactgataggtgcgtaacgcgcgttccaatgctgggtcacccgttcccaaaacaatgagttgcacatcttgttgctgcaagaatggattcaatgcatccagcaagaggtcgatacccttttgcttcgttaaccgagaaacgactgccaataccggcacgtttttgacaggcaaccctaatcggcgctgtaaagcacgtttattctgacgcttaggtttcaaattcttagccgaataattcgccgttagtgccaggtcggttgcgggatcgtataattgcatatcaatgccattaagaatcccactcagtttgtaccgattggcccgcagtaccccgtcgagacgttccccaaaagctggtgtttgaatctcttgtgcgtaggtcggtgacaccgtattaacggcatctgcaaagttaataccgcccttcagccagttcacttgatcgtaaaacgccacgccggcttcggtgtaggtctcagttccgattcgaaagagactatccaaaataatcggatcgtagacaccttgaaactgtaagttatgaatcgtcagcaccgttttaatatcacgatacgcttcgatccaatagtacttttcagctagcaagacaggaataaacgctgtatgccaatcattgagttgtaaaatatcagggatataatcgatccgctccatcatttcacaaacggccatttgaaagaaggcaaagcgtgcaccatcatcccaataaccatataatccttcacggccaaaataatctaaattatcaattagataatactgaacgtgcgcgactgtcagagttttaataccgcaatacatcgcatgttcacccacttgaacagtaaaatgcgtcactggcactaactgctgctgatattcggtcggcatctggtgagggtaatacggaatcactacacgcgtctcaattccttccgcttgcaaggcgcgcggtaacgccatactaacatcgcctaagccaccagtcttataaaaaggggccgcttctgccgccgcgaataataccctagtcatgcacagccacctccgcttgttgaaagacgtgctgccctttgctgatgactaacggtgtcgttgaagttcctttaagcactaggttgggcccgattacggcgtctttatcgataatgacgttttctaacttacaaccggcaccgatccgggccccctgcataatgatggcatttttaacttggctatcacgattaatcagtacatcccgaaagatgacggagtggtcaagttgcccttcaatatagcccccagtaccacataaactatcacgacactgtgaaccagtcgcaaagaacgtcgggatttcatttttgaccttggtgtaaatacggcgcgaactgtagaataacgctcggaaattagcttcatccaaaacggccatattggccgcaaagtagctgttgatatcatgaatattcgcctgaaagcccgtatattcaaaagcattagcgttatgttggatgactgcttgccgcatcaattcctctaggctgatcatgtcaccccgttgattggccgactgcaataattcgattaaatcgaccgtactcatcaagtaaatagccatgctcttggcaacttgtttcgtcttcgggctaatcttggccttgctcatcggaacgaccgccgttgcttctcccttagcagtcaattgtaagattgtattttcgggaatcaaactagctggatcaacgcgcttataaaccgccgtcacgggactgttacgttcctcgtgataccgtagtagcgcctttaaatcaatattaccaacattgcgagtactcatcactaccgagtactcactctggctgcatttcagaaactgaatcgaattatcatagtaatggtgcagtaatgcggccttcttttctggcgccactaatttcaagtcattgtatggggacaagaataggccgccgcgaattgtgttcaggctccagtcacgcccgctacgcaaatgatcagccacggaacgccctgaccgcgggaccgtcaccatcacattttgaatccccgcattgatgacactcgataattgaaaatcaaccaaccgataacgaccaccaaagggtaacattccaactggccgaactgcagtcaatggttgtaacgcgtcacttggttccagtaaattaataatggcactcacttgttcacgtctcatggttgttccacccccatcgtttcgtgatacccaacaactgcaatcttatcagtcgtaccaataatctgggcatcatcaccaatcaatgcatcttcgccaatcaatgcgtggtcaatcaccacattttttccaatcgttgcaccgggcataatcatactgtcaaccacgcgactacccatcccaactgacacgcgttgcgataagattgaatgatcaatttcgcccgcaacgtaacaactatcaacgaccatggcattattaacctggctcgtttccgtcaaaaacatcggtggtagcacctctgctttagagtaaatccgccagtaacgatcgccgatatttaaccggttatggggcgataggaattccatattggcttgccacagactcttaatcgttccaacatctcgccagtaacccttaaaagcataagcgtaaacggattcattattggctaagtatgatggaatgacatttttaccaaagtcttcaagtgacttatcggtagcataactcttaactaagtaatcccgcaaagtcggccaattgaagatataaatgcccatcgaggctttatcactcttaggatgttccggtttttcctcaaactcaatgattcgatccgtcgcatccgtattcatcatgccaaagcgtttggcttcttcgttagtcacgtggatcaccccaacggtcaacgaagccttcttctcctgatgatatttcagcatagcgtcataatccatcttataaatatgatcgccagataagacgagcaggtacttggggtcttgttgatcaatatattcgatattttgataaatggcgtgcgccgtcccttgaaagaacttctcaccttcactagacgagtatggttgtaaaaccgtcaccccaccatttaagctatcaaagccccagctcgcaccgctaccaatatgtgcattcagttctaggggttgatattgcgtgataaccccaacggtattcacacccgagttagcacagttgctgagtgtaaaatcaataattcgataacgaccgccgaatggcacggcgggcttagccgtatccttcgtcaacttaccaagccgggtgccctgaccgcccgctaaaataatccctaacatttcatcttgcatgcttaactcctcctatcactttaactggtcgaatcaacaatgcacccatcgccggcaaggtcacggtaaaactagctggttgcccccgatacggcttatcgaccgccgtaaacgttgtttctagctttgtccacgtgccgccaaaagcctgcgcttcagtattgagtaacaactcataacggccacgatacggtacgccgatccggtaatcttgacgttcaacaggaacaaaattgaaagcagcgaccacaaaactgtatttccgtttggcctgccggataaaccccatggtcgaactgtcaggatcatcggtatgtgtataaataatccccgcaggatcatggtcctgttcccacaacggccgattgtgccgatagaccgcgttcagttgcgttgtgaactgttgcatccgatggttgagatcatcctttaagtcgacccattccaacgcactccagtcccgccactctaggaactgcccccactctgagcccataaaattcagttgttttcctgggaaggcagccatataagttagcatcgtccgcaaatttgcaaactgattatagcggtcccccggcattttatgcattaatgatttcttgccgtgcacgacttcatcatgtgaaaacggtagaataaaccgttcatcgaacatgtacacgaatgcaaatgtcagtagattaaagtggtcgtgccgatataacggatccatcatgaagaaatccagggtatcgtgcatccaccccatgttccacttatagttaaatcccaatccgccattggccaccgaacccgtaacctgcggataggcggacgactcttccgcaatcatcaagatatcgggatggtgggttaagaccgtggtgttcaacttttgtaaaaaggcgatgccttctaaattacgattatccccatactgattaacctgcccttcgcgcccttcatcatagtcgcaatacaacatgttagagacagcatccactcgcaagccatctagatgacactggtcgagccaatattcggcgcttgaaatcagaaaactctgaacctgtgttttaccgagatcaaaattccatgccccccaacgacggttattcgcgcgctcaggatcagcgtattcaaatgtcggcgtaccatcatactggtacaacgcatcataattgcgaataaagtgacccggtacccaatcaacgaataccccgatattcgcttggtgacactggtcaacaaagctgagaaaactgtcacgcttgccaaaacgactggttggcgcaaaataccctaattgctgataaccccaagacgcatctaacaaatgttccatcacgggcattaattcaatgtgggtatagccccgttgttttacatagggaatcagttcagcggctaattccgcataagtgtagtagctaccatcaagatgacggcgccacgaacctaagtgcacctcataaatgttaattggccgattggcagcgcgcgacttcttccggcgagctagccacaaactatcgtgccaacgcatcgtcatcggctcaacaactacggccgcatcccccggttttcgttcgaactgttgtgcaaacgggtcaatctttagttgcacttggccagttggtgttgtgatctgaaacttgtataactgacccgcatgaacgttcggaacttgtccttgccaaatccccgtcgcccctaataactttagtgcgcttggttgccagtcattaaaatcgccaacaagcccggcagccttagcatgcggcgcccagacgcgaaataccgcccgaccagatgcgcccaaatgacagcctaagtaatcctgactattaaatcctgcgccggtattaaataagtaacttgcatcattcatttccgtagtttgtttaaccaaagcatcacaccccctatgtgattaactgagcagattataaaattaatcttattataagaaggtgacagggtgtttgcctatccttgataaggtcgccttacttagtgatcaaacagggcacaaacccctaaaagataacgattattatgactagccacccagaccgctgcaaactgattcaggacaactattcacagttaagcccgtggttatccgttttattgcgccgtttgccaaaacatcaaaaaaagcccgaaaaaacgcgttttttcgggctagttgatttattcaattacatttctatcaaattaataatatttatctgactgattacttccagtaggcatagcgataaagggcgtctcgcaacaatgtgaagtgaaccccaccaaccttgttactgatcaagtgagcagcagcagtttgataaatcggtgtgaccccctgttgctgagcgactagcttagccgcttgctgcatcgtctgatatcgggccttagttgactgcttatcggccgtaatcgtcgagattaattgctcatatttcgcattgttaaacttcccaaagttgacagaattagttatcgaagccttattcaagaaatcaactggatcttggaaatcactcgaccacgacaacgtggcaaagtcaaaatcacccttgcttaaagttgaaatctcatttgtcagtggtactgacttgacattgaccgtgacaccactaagatttttctcaattgcagcttgaatatattctgccaccgacttattaatatcattatcgttcgtcaataattgcagtgttaacttttgctttcctaagctcgcctgagccttctgccaatactgtttagcctttgctggactgtatggatacaaatttccggtatccgtattaaaatctttccctgttgtcgggttcttggtattgccagcaggaactaatgacgtcgccgctactgagccgtctttgagaacgttcttaaccaatgactggcgattcaaagcgtaactcacagcacgccgcaagtcagtattctgcaatgctgagcgcttctggttccacaacatgaagtagagttgatttaacttcgtaaccttcatctgactttttagtgacccttgctcagctgccgatacttgggtgcccgtaatctgggtgacttggacctcattgctttggaagaggttctcggccgtactgttatttttgaccgtctgcaccttaatattcttgattcggacctgtttacggtcataataatacgggttcttcacatatttccacgtgtcattcgtcccattccaactcttcaagacatagggaccattagagagcgttcgctgtgccgatgtcccatacttattcccgtatttctcagtaaattgtttgtttaacggatagatctctgtggctagccgataattaaaatacggcacgcgctgttgcaatgtaatttgtaacttatacttacccaacgctttaacgcctaaggtcttcaccgccttcttaccagccgtgattgctgttgcattcttgatttcagcaacgtgtccgacttcctgtgacttggtattcggatcgacctggcgttgcacggaataaacaaagtcagcggccgtgaccttttttccattcgaccacttggcattgtgccgcaaattaaaggtataagtcttcccattattagtcggtttgacgactttcttggcaattgccggcacgactttccccttttgattagttgtatacaagccttccataaactgagcaatagcggcctgactagcgatatcgtcggccttattaggatcagcggtcgcaatcgactgggtcgccgttacgttcaacgtcttctgctgactactctgctggctaccgcagccagttaagactaatcctagggctacaataccaatactgctgatccatattctttttttcatgaatgatgactcctaacttaacgatgatgtcggttactggcaacgatacttcgattggcgccgacaacaacacatcaacggtaagcctccgttatccgtggtaaaccggtaattaccggttttcacgactacaataacgttttgcaatcctgcgttcatcatcatgattcctccccttagattaaaaactaattaagataagattagcttttaagtttacatctgtcaactaaaagtttcgctcaacattctaagtcaccatggtattgtgccttcactattcaggccgaaaccagcttgctgcttttgaaccaaacgtatggtacgcgagcttaaaactagaccggctatgttgggttatcaaatcaagaagtcaaaaatcggataaacacttgtccccccaatcggcaataaaaaaatcgctattagccgatataatgactaataacgatacttgctcatcaatggcgaatctgaccattgccatcaatgacatatttataagatgttaattccgctaatcccatcggaccgcgagcatgtaacttctgcgttgaaatcccgatttcagcgccaaacccaaattcaaagccatccgtaaaccgggtggaagcattgatataaacacacgctgcgttgacccgttgctggaagagcttcccagcttgataattatccgtcacaatagcttcggaatgttgggtattgtaacgattgatgtgcgtaatggctgctgcttctgaatcaacaactttcactgcaataattaaatcattatattccgttccccagtccgcatccgttgctggaaccacatcaggaacaatggcttgagttgcggcatccccgcgtacttctacgccttgttcacgaagtgcctgaatcatgctaggtaaataatcggccgcaacctcacgatgaattagaagcttttcagtggcgttgcaaaccgatggtcgctgaactttcccattgatcacgatatcggttgccatttgcaattgcgcgtctttgtccacatatacgtgacaattaccggctcctgtttcaataacgggtaccgttgctttagccaacaccgtttgaatcaaacgggcgctcccgcgtggaattaagacgtccacgtaatcagtgagctgcatgaacttagccgcagtcgcatgcgacgtatccgtaatcagttgaatcgcattctcatcgaccgcttcggcccgtaatgcaccacgtaagacttggacaagtgcttgattagagtgaagggcttccttaccaccacgtaagattacagcgtttccggttttaaaacacagtgctgatgcatccaccgtcacattggggcgcgcttcaaaaatcatgccgataacacctagtggtacccgttccttggcaatcatcaacccggcctcgttgcgccacgcgcggtccacatttccaattggatctggcaaactcacgacctgtttgagtccggtcgccatatcctggatgcggtctgctgttagccggagccggtcaacaaacttaactggtacttgcgggttctctaaatcctgcgcattagctgccaatatctcatcttgatggctcgttaacgccgttgccattgcggtcaacacttgatttttttgcgccgttgaaagtaaccccagcgtatagctagcttgttgagcctgctgacccaactgttctaaatctaccattttgataacctccccaacttaaccgaatagcgttccgactggttcgcctgctaaaatttgaaaaataattgtgggatccgcaccattggctaaaatcatttgaccattcgcatcgatcatccgttctgccgcttttagcttagtgaccatcccaccagtaccaaaccgactgccactaccgccagctagcttataagtatgttgatcaaccttctcaatgtgccctaataactgggctcgggcatccgcattgggattaccatcataaaagccatcgatgtcggatagcatgattaacaaatccgccccgatattcgtggccacgattgcggatagttgatcgttatcaccgaactttgtttcatgatccaattcatcgaccgcgaccgtatcattttcattaacaattgggaccacgttttgttttaatagcgcctcaaatgtattcaacacattatggtgactcttaggataaacaaagatatcacgtgttaataacaactggccaattttttgttcataaatggcgaaacgttctttgtaaatcgaaatcaattcagtttgcccaatcgccgcaatcgcctgttgttcaggaattgcttttggacgttgcttgagtcccatataattcaagccaacaccaatagcccctgacgaaaccaagacaacttcacgcccacggtgtcgcattgcgctaataacaaaggctaattgatcgattgcccgtaagttgatcgatccatctggataaactagcgtgcttgtcccgactttaatcacgactcgtttagcctttagttttcgtatcactttcactactgccaccaacttctctaattattttgtttcacgtgaaacatcggtctgaacgtccgtcttcatataattaacggccttgcgtaaattaaagtgaacgacaccgatattaactgccaacacgatcaataaaaccacaaatgccaacaaaaacagcaccttataagaccaattatcgataatcacaccaccaaataacggccctagcgagcgccctaacgcacaaaaggcttgtactagtccttggtaacgccccttagcactaactggtgataactgactcactagtgttggcatggctggtgaccaagttgcttcaccaatcgtcaataaaatcatggcaaagataaagtgtgggtaatcatgcgcaatcacaagtgatagaaatgataagcccacgaatagcatgccgaagaaaaattgattatataaatttttaatccgattccccagcaaacttaaaatactctgaataaggactagtaagcccgcgttgattgtccatagaaaactgtaattccgcagcggcatccccaaattcgtcatgtagacggataaattgctgacccactgttcgtatagcaaccagataatgaataaactaataaagaaggtccagacaatgtgaaaattggcccgtggcaagtgcacatcttgtccttggcgcggatcaaccccggtcacgttcgacgaatccacattgtattcaaataatgcaataatcaagaaaatcacgaagaggctcgtggtcatcgagaatagcaaggccatccccatgctatacacgataccaaccagcatcgtgccgaagacaactccgagattggcagcgagatacatcaacgtaaacgttcgccgcactttatcgcgggggacactggcagccaaagcattaaacatcgtatttagccagccactagcaaacccggtcacgactaacaacatcggataccacggccatccatgaaaaaagatcagagcaaagttcgcgaggccattcaacgtgattcccatcagtaacaggtgataaggattacctcgatcaaatatacgcccaccaatcgtacttgccaaaacgttggcaactgaattgagcatcaggacaattccagtctccgtcaacgacttacctaacacattgtgcatgtagatcgtcgttaacggccaaatgaaactcataccaatgttattcataaactgcccggcaattagccacggcgttttaatgagttgcttttgtgccacgccatcaccaccattattaaatctgtctacttttcatcatagcaaagtttatttaaaataacagggacatttatctcactaactcattattatcacggccaaattggtgcatcagcccaaccaattagcggaaaacaagtagcctcggcacgtgataaacaaaaaattcctcttaattagtttaagaggaatttgataacaaatttattgatcgactgcaattaagcttggggatcctgcgcataagagactgaggagaacttattaaatggtttcacaaataatagtttgaccgttccccgcgccccagcacggttcttttcgataatcacttcaacttcaccaacatcctcagaagcatcttcgtcccgcggatcgccgccattaaagtcaccaccgccaccaaaattaccgccatcatcatcgtcgccgccttcgcgatcataataatcttcccggtataggaaggcaacgatgtcagcatcttgttcaattgaacccgattcacgaatatcggaaagcactggccgcttatcttgacgctgttcaacaccacgagatagctgtgataaggcaatgactggaacacctagttccttagccagtttcttcatttgccgcgaaatttcggaaacttcctgttgccgactttctgtgttactaccttcgatcagttgcaaataatcgaccacaatcaagccgaggttaccttgctctttcgctaagcggcgacttttggcccggatttctgacatcttgattccgggggtatcgtcaataaaaatactagctttagacaaactccccatggcaaccaccaagtgttcccactcttcttcgttcagttgccccgtccgtaaatgcccagcgtcaatactaccttctgcacacagcatccggttgactaaggattcggcacccatttccaaactgaaaatggccactgtcgtatccgttttagtcgccacattttgggcaatattcaggacaaaggctgtcttaccaacggctggccgggcagccaaaataatcagattatccggttgtaagccggcggtcattttatccagctccgcaaaaccagtcggtaaaccggtaatgtcatcatcattttgatacaagcggtcaatttcttcaatcgacgcgttcaacacatctgaaatcgacttaaacccactctgattacgctgttcagacacgttcataatgtcgcgttccgcgtcatctaataacgtggtcacgtcatcattttccgtataggccttttgcgtaatctccgtggccgtcttgatcaaccgccgcaccgtcgccttttgcgccacaatcttagcatagtagccagcgttagccgcagtcggtacggacccagctaattcagcaatgtaactcatcccaccaacatcatccaattgattttgggccgttaataaatcactaacggtcaccgcatcaatagcctcgtcacggtcatttaaagtcaccatgctggcaaaaatgatctgatgtgcgcgccgatagaaatcttgcgcttcgacaaactccatcgcttccacgagggcatcactgtttaagaaaatagcccccaagactgccttttcagcttcaatattttgtggtggggtttgatccagcacatcgttgttcatttgtgatccgtccttttacttttcgacaacgtgcacgcgaattttcgccgttacttctggatgtaacttaacaggcacgtttgtgtaacctaatacccgaattggttctggtaattcgatcttacgtttatcaagcttaacttggtattggtcagctaacgccgttgcaatttgtttgctaggaattgacccaaacaaccgaccatcagtaccagctttggccttcaattcaacaaccgtttcatcagcttccaaaactgtcttgacttgcttagcttcggctaattcctcagcggcacgtgctgcttcagacttctgttcagccttcaacgtattgattgccgctttagtggcttccttggccaatccctttttaattaaaaagttctgtgcgtaaccatccgggacattcttgatttggccccgcttgcccttaccacggacatcattcaaaaaaataacttgcatttagactcactcctaattagattctgtggtcggctcatcagttgccgttaacaaatcaatcaacgattgtttgacggcttcaactgactgcccttcaatctgggttgcagcattcgataaatgaccgccaccacccaatttttccatataaacttgtacgttgatctcgccaagtgatcgtgccgaaattccgacccgtccatcttcacgacgtgtaatcacgaatgatgcgtcgacaccagacatagataatagtgaatcagcagcttgagccgccgttactgggtcatagacctgatcatcttcaccaacacataatgccatatcctgattaacaaattcaacggtttcaatcagatgattgcgttgtagataactatcaacgttctccttcataaattgttgaacgagtaacgagtccgcaccggctgatcgtagataactagcagcatcaaacgtccgcgatcctgatcgtaatgaaaatgacttcgtatcgataacgattccggtcaacattgcggtcgcctcaatcttattgattggttcggcatcgtgcgattgatattcaaacatctcggtaatcagctcacaagtcgacgaagcatacggttcaatataaaccaaaactgggttttctggaaattcttcgccccgtcgatgatgatcaataatcataacgcgattttcgagccgctcataaagggcctgtgacattgaaatacttggcttagaatggtcagccataatcaataaactttggtcagtggccttctcaagtgcttcttccggcgagataatcgctgactcgatgttctcatcagacttcaactggtccagtaaacgctgaatgtctgaatgcacattttgctcatccaagacgatccaacactgtttaccattcatttcagcaattcggcgaatcccgagacaggccccaacggcatccatatctggttggcggtgcccctgaacaaagatctggtcagattgattcattaactcttgtaacgtctgactgatcatccgggcccgtacccgcgtccgtttttccatcgggttggttttaccaccgtagaaacgagcaggttcgtcctcagacttcaccacaacttggtcaccaccccgccccaaggcaaggtccatgttactctgcgctaaatcggccaaattgttcatgttccgttcaccataagcaatcccaatactcaatgttagtgggaaattttgcttagaagtcgactcccgaattcgatctaaaatgcgaaacttattctcttcaacacgtcgtaaactactagcatagcccaacaagaagaagtgatcatcatccaagcgcttcaggtacatcccaaacatctgggtccacttagacaattcattggtcacgtaattgttcaggttggaaatatccgtatcagtcatcgactgggtgatttcatcgtaattatccaaaaagatttgtccaatcacgagtttttcatcttcgaattgatccgtcagctcagcatacttggtcacatccatcatatagaccgtattagtgctctgctggacacgtacatcaaactggtagtcttgccaacgaatcgtcgcgggctcgtccagatgagcgttcagcgtcgctgccagtgttggctcaatatcttccaagcggtatcctaagacgtccttatcaccgaaatagcgctgaagataaggattgatccattcgatggtctggtcggaattaaaaatcattactccgataggcatctgaatcagtgcctcttgttcgccgcgcttaatacgatacgacaagtctgagatatattcatttgcactcgaactgagctcaatcaacgtattataagatatcaccacagccatcacaatcaagatgaggacaacggtcccaaaaatccagttcattaaataaccagtgacgagcataattaacgacaagctaaaaataaccaacgctaagagtcgtaactgctgattttgtaggaaaaatggaattttttcacgcgaaaagatctttttcatattaaaaatccctcaagccttctcagtaatgactatattttatcacaaaccaccgtccgcttcagcgtttcgtgtcaatcaccgtaaacgcttcattgaacggccaccaccctatctagtcaagttaagggtaaataaaaaccacagagccgaagtctgtggtttttgaatgactaaaaattagtcttcagatacaaaggctaataagcccatgatccgtgcacgcttgatggcgatagttaaagaacgttggttcttagcactagtccccgttacacgacgtggcaaaatcttcccacgttctgaaataaagcgacgtaataagtcagtatctttataatcgatgtattcgatatggtttgcggcgatgaagtcgactttacgacgacgacggccacctcttctttgttgtgccattgatatttccctcctcgttatctgtctaagcaattagactagaatggtaaatcatcatccgagatatcaatttgatcgccattattagcgaatgggtcagcctgattattgttgttagcactgcttgatggtgccgcactgctagcattaccagtattaccattaccaaatgggttattgttattcgctgatgattgttgaggagccgcattttggccttgattactatacccattattattgttgttgtaattgttattaccactaccaccattggcagactgatgacgttcagactctgcccgtgattctaataatgagaagttttcaacgacaacttctgtaacgtaaacacgtaccccttgttggttttcgtagttccgggtttgaatccggccatcgataccaacaagtgaacctttatgagtaaagttcgcaaaattttcagcagctttacgccaaatgacgcaactaatgaaatctgcttcacgttccccattttgattcgtgaattgacggtttacggcaatagtgaacgtcgcgacggcggcaccaccattcgtgtaacgtaattccggatctcttgtcagtcggccaacaagaattgtacggttaatcatgcagaagcgctcctctcttaaaattaattttgtctattagtcttcgcgtttaacgatcatgtgacgtaaaatgtcatcattgatctttgaaagacggtcgaattcgtttaaagcagcatcgtcagttgctgttaagttaacgatatggtaagtaccttcgttaaagccaccgatttcgtatgcgaaacgacgctttgaccagtcttttgaatcaattactcgcgcaccgttatcagttaagattttgtcgaaacgatcaactaaggctgtcttggcagcatcgtcgatgtcgggacgtacgatgtaagtaatttcatatttctttgattcactcatgaaatttgcacctccttatggacttcaggcccttctttttgaagagcaaggaaagtaatctagctaatgctagatactcacgaatttaaagtatagcatctaaatcagtttgttgcaagggttgaagcggccgactgttacaaaaagatcctgaatccgttacaccaatcaattacgtcaattgagcgatatttcattttatttcccgggaaatatttcttttttctgaaatcctccccttcgcttacatttccccacacccacacagcattaatttaaaccaagtcgacgtcagaataacacgcactgctgtaatcctctcaatcgcacaagccagttttgaccgcgtaaatctaaaattgcttacttcatgttgtcctctcccaatttatcggcatttctgccaatcactggaagatggcaggactaagtgatgagcctccagcagtcaaattattcttcgcaggaagattgtttctaccggttcaaaacaagactttggaggccagaataggaccgatgaccggtaaatcacacacgacccgttgccataataattcttgactcacataaaaaacaagcgtggtcgacaatcttgtcgaccacgcttgttttatcaatttattcgtttgaatcgtttgaatcgtttgaatcagttgttggttctgtcgtagtggcatcggcgttgacggtttgatcgtcaactggtgcctcagtcgttgcatccgttgcgacagtctcatcaacttctggctctggatcaaccttggccatcgttgcgacttgaccatcatcgcctaaccgcatgagacgaacacctaaggttgcccgaccagtctgagaaacggttgcgatattgaagcgaatcatgaccccttggttcgtcattaccatgatatcttcttgaccatcaaccgtcgtcaaaccagctaaatgaccattcttctcagtcacgttagcggtcttgattcctttgccaccacgccccttaattgggtaatcggcagctggcgtttgtttcccataacccttttccgtgatgatgaagacgttgctgtcgggcttcaaaacgtcaaagccaatcacaaagtcatcatcgcgtaagcgaatcccgcgaaccccagaagccgtccggcccatggaccgcactgtggtttcgtcgaaactgacggcataaccgtcgtgcgtcccgatgattacattttggtgaccatccgtgattgtaaccccgattaattcatcatcatccttaagcgtaatggccttcaaaccattgctacggatattggcaaattcttgaactggtgtccgtttgacaacccctttaacggttgtaaagaacaggtagttatcagaagcgctcgcatcgcccgtgacattaacgaccgcctgaattttttcaccagaattgactcccagtaaattgatgaccgggattcctttggccgtacgaccgtattcaggaatctcgtaagccttcatccggtaaactttacccgcattagtgaaaaagagtaggacatcatgggtcgacgtcgtcaggagatgttcaataaagtcatcatcatggacgtccatcccttgaatcccacgaccaccacggtgttgcgacttaaattcagtcgttggtaaccgtttgatgtagccattgtgagttaaggtaacagccacttcttcttcttcgatcaagtcttcatcttcaatactgaggacttcaccgaccatcaattcggtccgacgcttatcaccaaacttacgttgaatttccattaattcttcgtaaataatttggttgatacgatccttgctagctaagatttctttgtagtcagcaatggctttcaataagtcctggtattcactctcgatcttttcacgttccaaaccagttaaccggactaaccgcatatcaagaatggcttgtgcctgcttatcagacaagccgtaattatccatcaattggttcttcgcaatttcactcgtttgtgattgacgaataatcgcaatgatttcatcaatgtgatcaagggcaatccgtaagccttcaagaatatgggcccgtgcttgggctttcttcaagtcaaactcagtccgacgccgaatcacgtcttcctggtgttccaggtaatagattaagatttgctttaagcttaagacttttggagcacccttaacgatggctaacatgttaaagccaaagttagtctgcatcaatgtcatcttgtaaaggttattcaagataaccgaggcgctggcatcccgccgaacatcaatgacgatccgcatcccttcacggtcactttcatcattgatatcagtgataccttcaatttccttgtctcgagctaaaccagcaatccgttcgatcaatttagctttattgaccatatatggtaattcggtcacgataattcgttgcttaccattcttttggtcttgaatatcgaccttcgcacgaacaataatgttcccacgaccagtctggtaagccttacgaataccggactttcccattacgatcccgccagttggaaaatctggtccaggtaagacttccatcaagtcagcaactgttgcatcaggattatccatcaacaggtggattgctgaaatgacttccgctaagttatgtggcggaatgtttgttgtcatcccaacagcaatcccagtggcaccgttaacgagtaagttcgggaaacgtgctggtaagactgctggttcccgttctgtatcatcatagtttggttgccaatcaacggtatccttgttaatatcgcggagcatttcaaccgcaatcttactcatccgggcttcggtataccgcatcgcggcagccccgtcaccatcgacagaaccgaagttcccgtgaccatccactaacatgtagcgatagctaaagtcttgggccatccgcaccattgactcataaattgcggagtcaccatggggatgatacttccccataacatccccaacaatccgggccgacttcttatacggcttatccggcgtcacacctaattcactcataccgtaaagaatccgccggtgcactggctttaacccatcacgtacgtccggcagtgcccgtgccacgataacactcatggcatagcttaagaatgacgttcgcatggtcttcgaaaggttcacatccgaaatacgattgttcgataaatctgaatcagccaaaatattcgtcctccttcatccgttttgccgctattaaagcttgattaagctttacatgtctcaagtaaaagtcgccattaagacaaccgtcgtgccattacgaccctaagtctgattaacagcttgcgcctcagttcttaggtcaaaatgactaaactgacacactaaacatccagatcctggacgaacttggcattatcttcaataaattctcgccgtggtttgacttggtcccccatcaacatcgagaagaccccatcggcatccgcagcgtcttcatcacgaacccgtaataggcgccgcttgtctggatccatggtcgtttcccataattgttccgcgtccatttcaccaagccccttgtaccgttgaacaactggtttcggtgatggtgccaattgccccatgacctcactcaattcttcatctgaatcaatatacttcacaaatttaccttgccggacttggtacaacggtggttgagcgatgtacacaaagccagcgtcaactaatggccgcatgtaccggtaaaacaacgtcaataacaaggtccgaatatgggccccatcgacatcggcatcagtcatgataattaatttgtgataattggctttgctcaagtcgaagtcaccaccgaagccagttcccattgccgtaaacaatgaccggatttcttcattggctaaaatcttatcaatgctggccttttcaacgttcaaaattttaccccgaatcggtaaaatcgcttgcgtcaaccgggaacgtccctgcttagccgacccaccggcagaatccccttcgacaatgaacaactcactaatttcagggtctttactactgttgtccgccaacttacctggtaaattactaatttccaagccactcttttttcgcgtaacttcccgcgcacgcttagcagcgacccgggccttggaagcaagtaaccctttatcgaccactttacgggcaacacttgggttttccatcaagtacttgctaaagtgttctgagaataaccggtcaactgctgcccgagcatcggaattaccaagtttcgtcttcgtttgaccttcaaattgaggatccggatgcttgacgctgacaacagccgtcatcccttcacgaacatcttcgccagataggttcgcatcgctttccttcaacaagttattcttacgagcatagtcgttgatgacccgcgtcaaagcacgtttgaaaccttcttcatgcgtcccaccttcgtacgtatgaatattgttggtgaaggtcatcaaattactgtggtagtcgtcagtatattgcaacgcaacttctaccgtaatcccattctgttccccttccacataaatcggttctggaaatagaacggtcttattcttatctagatattcaacatagtgacgaatcccaccttcgtagagaaagtcatcttcagtgggttcatcagggcgattatcccgaatcgtgatccgtaatcccttatttaagaaagcgagttcgcgaatccgagtcgtcaaaatattaatgtcataggtggtcgtttcccggaaaatatcaggatccggaacaaaatgaaccgccgtaccatgagcatcatcaggcgcatcaccaatgatcttcatcggtgttttaacctttccacgttcaaagtccatgtaataaacatgaccattccgagttactttgacgtccagggtcgatgataaggcgttaacaacggaagccccgaccccgtgaagaccaccagagactttataaccgccaccaccgaatttaccaccggcatgtaaaatcgtataaaccgtttcaagcgctggtttacccgttttttcttgaatatcaacaggaatcccacgaccgttatcagtaaccgtaatactattatccttttcaacggtcacgtggatcacgtttgcaaaccctgctagggcttcatcaattccgttatcaacaatttcccaaactaagtggtggagtccttggctactcgtcgtaccgatatacattccgggacgtttccggacagcttctaaaccttccaaaacttgaatttgactagcatcatattcgcgagcctgttcaagtttggtttctttttcgttttcggtcaatgcggttcctcctcatgtaaagtgccatggctaacttcaaatacttttggcgcattaattaatttgcgggccaccccgtcaagacttggcgtggttaaaaaggtctgcactttatcttggatcgctgtcagcagatgagtctgccgtgcagcgtctaattctgataagacatcgtctaataataagaccgggtactcgcccgtctcagctttcatcagatcaatttcagcaagcttaacggacaaagcagttgtacgttgttggccttgggagccaaaagtctgcacatttttgccgttaacaccaaattgtaaatcatcgcgatgaggacctaataaagtcgttccttgaaaaatttctttggcttgttgttgctgatataaggcctgtagcgtttgataaatgtgatcgaccgacgtctggtcggcagttggcacttgagtgacatagtgaaacgttaattgttcctgttcttgcgtaatctcgctgtgaacagcttgcgcccatttctcaagttgctgcaacagttgtagtcgtttatggatgatttccgcaccaaatgcagccaattgatccgacaagacacccaaataaaccttatccttggcctgctgccgatttaattgccgtaagtattgattacgttgttttaaaatcgtgcgatactgacttaggttatagaggtatttagggctcatctgaccaaattccatatccataaaccgacggcgaaccgcgggtgcccctttaacgatggataaatcttcaggtgcaaacacgatcacgttcaaatttccgacgtactgggataatttggcttgctcaagatgattgactttcgctcgcttgccccgccgccccaattcaagttccagggggacagcaccggtacttttatgtaaccggccttgcaacgttgccgtggtggtttgccaccgaattaattccttatcgttagcggtgcggtgactacgcgttaacgccaacacataaatggcttccaacaggttcgtctttccctgcgcattttcacctaatagaacattaacgccctgactaaaattaatggtcaaatccgcgtagttccgaaaatcatgcaagactaagttttctaagtacatctaatcagtcgtttcttgatttgagcgaataaaaaatgacccgttgtcttcaacttcaatcgtatcgcctggataaagtttccgaccccgccgatcatctggttcaccattaactaacacggttgtttcttttaagaaccacttcgcctgaccacccgatccaatgatggccgtttcttttaagagttgccccaacgtcatatatggggttttaatatctattggctgtttcacaatgtcacctgcctatctgattacaagctattaaacgactgtctggcgtgctacacacactcctaacaggttatattatacttgttttttgatgaaaattcaatttataaccgcactcagagccattttaagacgatttaaggctttttaatatcgggatactagcctaggggtaaatttgctgaaattccctaattttgcggattttaataaaatatcttgttttttacctataaaaattggctaaagccagcattcattatctgaaagcgagcgtttgtagcgaacgagtgcaaggactggggttcatcagatggtgggattttagtagggcaacatcgatagttagcgtgacaattcaccagcagctaatataatatgcataagttaaaacttcaaaagttacatcatcgctattgcctattcattgccccatctttagctagttttagccgtcataaaaggcccgcatttcacggtgaaatgcgggccttttatttagaattgtatatttattcagctaattaaaacgttcgaactggtgtaatcaactgaataaagttttcgccttcttcagttggcactaaagtgaatgggcgcaatgccatcgtgaatgagattttgatcatagcttgcccaaacgaacgtaacgcttctttcatgtagtctgggttaaacgaaatttcaagttcgtcacctgacaaatcagtgggctgtagttgttccgttacttccccgacatctggtgagttaccgaaaatcgtaatcgttttgtccgttgggttaacggagaagcgaaccacattattgcgactttcgtgtgataacagggatgcccgttcaattgctgctgaaagtgcgggtgctgaaatttcaacagtcgtattagattctttaggaatcagccgtgacgtgtcgggataatttccttcgagtaagcgagaatagaaggacgtattccccagcacaaataggacttggttttctgataaccgcatctgcacgtcaggattattgtcgccgatcatccgagataattctgtcaaacttttaccaggaatgattacatcataattggcattattggcttctggcaacttgatccggcgttgacttaggcggtgtgaatcggttgcgaccgctaagaactcaccgttagctaagataaaatgaaccccggtcaggattggccgactttcctgattggaaacagcaataacggtctgaccaatcaactctttaagtacatccccagctaacgtgatggtattagtcgtatcaatttcaggtaagtgtgggtagttttcagggtctaagccgttgattgtaaaggaagcggctcctgaagtaatttgtgtttgaaaaccgtcgaccacgttaacagtcatggtgtcttctggtaatttttttacgatttcactaaagaaacgggcaggtaaaacgattgaaccggcatcttcaacgactaacgtattgttgtcatcacttgctggaatggtggtttcaatagaaatatcagcatcactaccagttaaggtaatagcgtcagtattaacgtcaagtttaagaccagtcaaaattggaatggtcgtttttgaagaaatggcccgttggacgttatttaattctttgatgaaggcagatcgattgatcgtgaatttcataagttaatcccctctttattctagcgacgggcactagatatatattaataataaaagttcgtagtaatagtagagcagtgggtactgtggaaaaccgagtaaagactcggcgttatcaagttttccacatgtgtataagttgtggaaaactttttgagttatccttttttatccacactaagatttgagctggcctgtcaaatcacccacggctttttgtaattcagcatcagttttgagtgccttagtgattttatcatgcgcatggatcacagtcgtatggtccttaccaccaaactcgttaccgatgcgcggaagtgaactttcagtcagttcgcgtgataaatacatggcaatttgacgtggaatcacgatttgtttattgcgtttctttcccttaaggtcagccattgttacatggaagtacttggcgactttttcctgaatgacgggaatcgaaacctctgatagtttactgctaaggtgcaaactcttcaatgcatccgccactaaactggtggtaatcggtgaattattcagtcgtgagtatgcctgcactcgtgctaaggcaccttcgagttctcgcacgtttgagtcgatctgaccggcgatataacttaacgtatcgtcagggatttcgatcccttcaagatcggctttattgcgcaaaatagcaatccgcgtctcgagatcaggtggggtaatatcaacggataatccccacttaaacctagaaactaggcgatcttggagttgcggaatttcgttcggtaagcgatcggatgtaagcacgatttgcttatcatcttcatataaagcattaaatgtatggaagaactcttcttgggttgcttccttattggcaaaaaattgaatgtcgtcgactaataacaggtcaacgttccgatattcttcgcggaacgcctcctgttttttagtttgaatggcattaattaattcattcgtaaaagattcgctagtcacatatttaatgttactagtcggatcggtttctaacaatttgttaccgatagcgtgcattaggtgggtttttcccagaccaacgcccccgtagaaaaacaacggattatacatggtgccaggttcttccgacacaactaacgcagcggcatgggccatttgattgcctttaccgatcacgaaagtatcaaaagtgtatttcgggttgagtttcgtttcccgcataaatgtgggggtagttgcggttgttggttgttgtcccgcaacgttaccggtagtcacttgcgagtccttgtctctcgtaagttgctgacgttcttcttccgttatcatgaccggccgaatctgctcgttagtcgcttgcatcgcaatgtccgtgaactttgcggccaagtttttctcccaatagtcacgatgaagttgtgttgggacttcgatcgtcatttgggctttatcgagttggagtggttttgccggttcgacaaacgtttgaaacgtgatcttggacagatcttgttccatagagaacttaatgagattccataagtcattacgttccagcacgtggataccccttttcttaaaaaacgtaattctattttagcatgaacatatagagttttccacaagtggacaagttaaagttaagagaattcacaggctgggatttgaatatacacagcttgtcgaaaactaggaattaattttataaaacagcacttatccacaaaagcgagttcaaaactaaagccgcaataaaagcgtttattggagttatacacacaacaaatacgccctgtggataactaaataacaacccgttaatttgtcgaaaaacttgtgggtaaattgcgaataacggaaagtcactttgctataatccacaaataaattcgcaattaaataattttttgacctcgaattactacggagaaatttaatttactggttttcaaacaaataaaaatatgctatagtagtcaggaaatgcgtttagatgtaaactgcgttttgaaaataacgacttaatcgaattgattcatgtcattatggagaaggaggtgtcatgatgaagagaacttaccaaccaaagaagcgccatcgtcaacgtgtacatggtttccgcaaacggatgagcaccagcaatggccgtaaagtgttagcccgtcgacgccaacgaggcagaaaagtattgtctgcataggccactgataatcagtggctttttctttacagtcctagaccaggtgtttagggctgtaaagttgtgtagcaattcgctcaagagcttgagcgcacacatggagatggattatgcgaaaatcatatcgggtaaaaaaagaaactgagttccaacaagtttttgagacccgcaactcgtatgccaatcgtcaatttgtcatttacgttttggaaaaaccggggcaaccccatttccgcgtcggtatttcggtcggtaagaagatcgggaacgccgttgcgcgtaactgggtcaaacgccggattcggcaatcaatcaccgagctaaagccgcagcttaagcaagatgcagactttctcgtcattgcccgaccaaccgttgctggtaagtcgcaagccgaaaccaaagcttatctaagccatgcgctaaagctagcgcacctgctggacaatgattaaagtgaggacattcgtttgaaaaagtacagaaaaatactggcaatgctggccgtactagcgatcgtactagttttgagtgggtgtagtaataccccaatcacggataagagcaccgggttttgggatggcttaatcatcttgaacttctcacgggcgattatttggttatcaaacttgtttggtcatagttatggtctcgggatcatcgtctttacgttgatcatccggatcattatcttgccattgatgatcttccaaacccgcaacatggtagccatgcaagaagtccaaccgcagatgaaggctttgcaaaagaagtattcgtcacgcgatatggaaactcagcaaaagctccaagcggaaatgaagaagttgtatgccaagcatggtgtgcatccaatggccagcatgttgccattactagttcagttgcctattttgattgcgttgtaccaagcaatctggcggacacaagccttgaagaccggttcgttcttatggttgcaattaggtagcaaggatccgtactacgttttgccaattctagcggcgatctttacgtttgctagttcctggttagcgatgaagtcgcagccagaacaaaacgggatgacaacgtcaatgacgtatttgatgcctgtgattattttgattacggccattaacgtgccatcagcgttgtccttgtactgggtgatttccaacgcgttccaagttggtcaaaccttgttattacaaaacccattcaagattaatcgcgaacgggaagctaagaagcaagctgaacgtgatcgtaagcgaacgcttgaaaaagctagaaagcgcgcgattcgtaatcataaacgttaaatacaagtagacctgccatgtgtggtgggtcttttttgttggctctgtatcatctttaccaatcggtcaatatgatttggactgtgatggcaggatgctaatgtgcgtttatgtaaggcccctggacggtccgtgatgaggaaattgtaatgaacgatcaaatactggtaatagtaatcatccggggatcaaggtgcctataaaaataattgtctgcaccattttatcacatgtttttaatagcgtgccgcggtttgagagagctactttgtcagtcgtaattagaacgggcgattaaaaacgtaatgacccggcgcatgaaaaagttccaaaaaaagatttgacaaattgaaaaatgaccgctaagatgtgaatcacattaaaaaataattagattaagcgaacggcagtcgaggagtcggttatcagtcagttacagcgagtcgcggatgatgaaaagcgatctgaactggtagctaaaagtcgattactagtgagaagttgcgtgaagcaatttccgggtgtacccgataacgtaccaacatatcgtcaataaatttggccgtatgtaagtggtgagtctgactggctcgcaaatgaggtggtaccgcgtgaagacgtccttttaagcataacagcttagtagggcgtctttttgttttgcgggatgccggttgatctgattaaaatcaaaacataatggagggattagagatgcaagcaaagtatacatatagcattataggggtggtgagcgccttattattaaccggctgcttgggggcggtctctaattcttcgaaaacgaccagtacggctgatcaaaataggacgttaggcatcacgattcctggcgaaccgatgacgactgatccaacgacttcgatcgaaaccaacggcggtgccgtaattacacagactggtgaagggatttaccgcaaaagcgcgaataataagattgttgcgggggtagtcgagaagaaggtcaagcctactgaaaacaagacccggtatacgtttacgattcgcaaaaatgcacgctggcaaaatggaaccaagatcacttcacaagatttcgtgacggcgttgcggcggcaagctaatccaacaacgaagtctcaaaacttggatgccattagttacatcaagaactttgatgccgttaataaaggaaaaatggccgttaataaattaggtgtgacggctattaataagcgaacgttttccatcaagttgagcaagccggtgccttatatgaattatgagtttacgagcttttacccactcaatacggcggcagtccagaaatacgggtttaagttagggagtaactcagcgacgacggtagcaaacggtgcctacgttattaagggctggaaaggctctaatgatagttggtattacgttaagaataagtactactggaatgccaagaacgttaagatcaagcgcatcaaagtcacggtcactaaggatgataatacggcgcagaacctcttcaacgccggaacggtccaagtgaccaacatttcggggcagtacgtgaagaataatgccaataatagtcaaatgacggtcactaaaactggccggaataattacatttatttcaatagtaagaagtccgtaactgccaatgagaatttccggcacgcgctaagcctggtcattaatcaaaaaacactagcaaaagatgtcttgcaagacggctcgcaagccgcgacgaacattgttccgaaaaactacgcgagtgatccgactactggtgaggattttgttaaggaagttgggaacttatcaccgactaatatcaagcaagctaagcagtattggcagaaggcccaaaaggaactcggcaagcaaaatgtgactttgaattttctatgcgacgatacggatactgagaagaaactcgctgaatacgtccagggcgtggccgaaaagtatttgaaaggcgtgacgatcaagatcgttgcggttccacacgcgacccacgtatcacgtgattttacggggaactttgacctcgtcacagtcggttgggggccggattatccggatgcccaaaactttttggatgggatgcagagctcgaatagcatcaactttactcagtggaaagatgcgaagtacgatgcgttgatggccaaggtatctaatacggcgaaatacacggccgcgcaacggtggacttatgaaaagcaagctgatcgccggttgatgaaactcgatgccgtgattcccacttaccaagcctcttctgcatttttggtcagcaaggatgttggtggcttgcaatgggatgaattttctggaacgtccagtcaacttcaatatgcttattggaaataaaaacttgtcatgaaaggtggtgaggcgtggtgaatagtcagttagagaaccaacaatgcagtgatgaaaatgatggtccgttaccgttaatgaacggtgtgcgacctgccaaaatgaaaggaagtcattattatgaccaaaaccaactatatcaatgcctcaatctacagttcagaaaagcaaacttttatcgataatcaattcatgactgttgacgacgcaaccggaaaaatcatcgcggtcggtacaggaaccccggatacgattgctgaacaaacgacagacatgcaaggaaagtatgttatgccgggcatcatgaatgcccatacacatattaccagtattccaacttactggtggcatgacggccaggaagaccgccatccggagtcacgtgagtataataccatgtatgcgattcacaatatgcaagatatggtaaaccatggggtaacctatattcgcaatgttggcgcccagtatgatattgacgttgcgatttcaaagatgcaacgagaaggaaagattgcgggtcctcgcgtgatgacatctggccaggccttttcaattacgggtggtcatggtgcggatggcggccacgaagtcgatggtgtggatgcggtcgttcaaggtgttcgccaggcccttaaaatgggcgtcgataatatcaagatgatggttaccggtggggtacttcgaaacggcgagaccccagatgatattcagtttaattttgaagaagttcaagcagccgttgctgaggcccatcataaaggcaagacggtggcggctcacgcgcaggggaatgccggggtaaaagaggcggttcaagccggcgtcgatactgtcgaacacgcctttgatattgatgatgaaacaattgagatgatgcggcaacatggcactgtgatcgtaccaacgatgaacgcgatgtatgctatttataaatatggcgagaagaccgttccagcatgggcgcgtgaaaaggtaatcgtcaacatcaagaagcattttgcaagtatcactaaagccgcggcggctggcattcccatcgcgatggggacggatgctggaacgccttataatggctttgaggatgaatcagcatacgaaatgcagctctatgtcgataaggcgggcatgactcccgcacaagccatcgatacggccacaatcaactgtgcccgtgcgatgcatgttgcggatgaatacgggacgatttctgctggtaaatttgcagattttattgcaatgaccgccaatccaatcgaagatattcgggttattcagcaagataaggatgttttccaacatggcattcaagttcatcaagcggctaaaacggccggtgttgatgagcaagttcctgtacggcaggtcgggtagtccgtcttattgagaatcagggctaagtgtgggtagtcttgattcgtcatatgaccagttagtgtactgacaggtgggctggttctggcttgaatttgatagtggtttgatttagtggccaatcagtaggtcagatgccgtgaattagtcggctaaaaatactagcattataaaccgattttctagtcattacggacgggaaaatcggttttattgagtttagagcagctttgatacggctcgcgagtggcaattagtaaatacggcaaagggaggctgtgggccgcgtctctgaaacgcgccatgaacaggttggttattgacataataagcactagattttgctagtctgagttttcaggggtagtagaacggccgaagtcctaatcgttgtaagggttcattaagtgttcatactcaggtgttcgcatggcgaatggtaatgctataatgaaagcaggatttttaacgaggaggattcaagcatgacagtatttgaaggtaataccgtcgcggccgcaatcgcggctggtctaaaacaactgcaccgaacacgcgatcaagttgaagttgaagtgatcgctgaagcaaaaaaaggatttctggggctaggcaaacaccccgcccaagtacggctaacggtggtgccagcctccgcagcacctgcaacgacgccaacttccgctacggcgacagcgcaacagtcagtagctactgaatcaacgacagcaccgaccatgccgcggcctaccgtgcggacaccaaagtcaacgccgaccagacaagctaaaactagtcaggccacgaccagtgccgcaaaaccagcgactagcaaggcgaaagcagtggctaaacccgcttcaatggcggttaccaccggcccggttatcgctgataccgaccaatctaaaccagcgaccactagtaagaccaaatcagtggctgctgaccagagccagacgccgcggacatccgcagaaattgcagcgcgccaagcagctaacgagaccgcggtgcgggcgttgtgtgattacttgcttgcggtggtcaaagaactaggtgtcacggcggatcttgacgtcgacttcggcaaccgctatgcgacattgaatttcgatacaactaagcagggtttgctgattggcaaacacggtcgaacgatcaatgcactgcaagatttggcgcaagtttatatgaatcatcatggtgcgtcacacgttaacgtggtgctagatgtggatgattatcgggagcgccgggctgcgacacttaagcggttagccgagagtacggctcgagaagtgattgcaacgggcaaacaagttttcttggacccgatgccatcgtttgaacggaaattaattcacgctgaactagcgaataatcaccatgtaaccacattctcagaaggccgcgatccgcaccgggccgtggttgtggcgattcgcaaatagtttattcaaagtaacgcaaacaggcgtttgacaaactccgggtgagctattatagtaggtgttaatcattcttatcttttagataaagtagtcaaagtgctttatccacgctttaaggtggcgtggactaggcgctttttttctgcattttaggacatattattaactaattgtaagtaaatttggtatggtattaggcgatgaaacgctgacaagaaaggacatgatggtatgccaacgaccacagaatttgacacgatcgcggcaatttcaacgccgcctggtgagggtggtatttcaattattcggattagtggggaccaaacgtttaacgtggtgacccagatttttaagggtaaagatctcagtcgagtgcaatcacacacaatcaactatggacatattgttgatcctgatacccatcaggaagtcgacgaagtcatggcgaccgtaatgcgcgcgcctaaaacctatacgcgtgaagacgtggttgaaatcaactgtcacgggggactcgtggcaactaatgaaattttacaattgatcttgagtcacggtgcgcgaatggcggaacccggtgaatttaccaagcgggcattcttgaatggtcggttggacttgtcacaggcggaagcagttatggatctgattcgtgctaagacggataagtccatgaaggtcgcgttaaaccaattagatggtgatctatctaagctgattcgacatttacggcaagatattttggacgtattagcccaagtagaggtcaatattgattatccagagtatgacgcggttgaaacaatgaccaccaagatgctgaaggagaaggctaccgaggtcgcccaaagcattaatcaactgttagcgacggctaagcaaggtaaggtcttacgcgaaggtttggcaacggcgatcattgggcgtcccaatgtcggtaaatctagtctgcttaaccaccttttgcatgaagacaaagctattgtgacggatgttgccgggacgacccgcgatgtgattgaagaatacgtcaatgttcgtggagtgccattgaaactcgtcgatacggcaggaattcgggacactgaagataaggtcgaaaagattggggtcgagcgaagtcgcaaagcaatcggggccgccgatttagtcttattagtgttggataatagccaaccgttgacggctgaagaccgagagttgttgcaagagactgaccagtcaaaacgaatcgttatcttgaacaagactgatctaccagcccgtcttgatcaagctgaattggcgcaattagtcgatttgagtgacgttttaagtatgtcagtcttggaacaaagtggcgtcacgcaacttgaacaacggattgccaagatgttcttcaatgaaggtatcgaaagtagtcaaaataacgtgatggtgaccaatgcgcgtcacatcggtttgttgaatcaagccaaacaagcgttgcaagatgttcaaacgggacttgcggctggtatgccagttgatttggttcaaatcgatatgacccgttgctgggaattcctcggtcaaattaccggggatagctatgaagatgaattattagaccagctatttagtcagttctgtctgggtaagtagtggtaggaggaaattggaatgacagaagtaaagcagtacccaggccgcgactatgatgttatcgtcgttggtgctggtcatgccggttctgaagcagcattggccgctgcccgaatgggtaaccggacactcttaatgacgatcaacctagacatggtggcctttatgccatgtaatccatcggttggtggtccggctaaaggaattgtcgtccgtgagattgatgctttgggcggtgaaatgggccgtaacattgataagacttacgttcagatgcggatgcttaatacgggtaaaggcccagctgttcgagctttacgggcccaagctgataagcatgcttaccatgcggaaatgaaacacacgattgaacgggaaccgaatctgacgttacggcaaggaattgtcgatggcttaattgttgaagatggggtctgcaagggcgttatcacgaatacgggagcgcgctatagtgccaagagtgtcgttttgacgactgggacggcggctcgtggcaagattatcattggtgaactaatgtattcttcgggtccaaataattcgcaaccagcgatgaagttatctggtgatctggaacgacttggatttaacttggaacggtttaagaccggtacaccaccacgagtcgatggtaatacgatcgactacagtgttacggaagaacaacctggtgatcctgaaccacatcattttagttttgaaacgaaggatgctgactacattgatctaaagcatcaattatcttgctggttaacttatacgaatgagacgactcataagatcattcgtgaaaatcttgatcgagcaccaatgtttacaggcgtgattgaaggggtcggaccacggtactgcccatcgatcgaagataagatcgtgcgattcgctgataagaagcggcaccaattattcttggaaccagaaggccgtaatacggatgaatggtatgttcagggcctttcaacgtcgatgccggaagaagttcaacagcggattttacattccattaagggtcttgaagatgctgaaatgatgcgcccaggttatgccatcgaatacgacgtggtggcgccttaccagttaaaggcaaccttggaaacaaagttggtcaagaatctctatactgctggtcaaacgaatgggacttctgggtatgaagaagccgctgggcaaggattaattgccggtatcaacgctggtttgcgagcccttgatcgtggtcaattcactttgaagcgtagtgatgcttatattggagtcatgattgatgacttagttaccaaaggcaccaatgaaccctatcggttactaacgagtcgggctgaataccggttgatcttacggcatgataatgctgatttgcggttaacggataagggccgcgagttaggattgattgatgatgaacggtatgtggcatttgaggcgaaacgccaagcaatcaagaatgaacttgaccgtttaggcaaaatcagaatcaagcctaatgatgaggtcaatgctttcttacgtgctcataattctggtgagcttaaggatggtgtgttggcggcagatttcttaaagcggccagaggtacaatatgctgatttaatgaaatttatcccggcagcacccgagccactagaacggcatgttattgagcaagttgaaattcagatcaagtatgccggttatatccaaaaagcagaggaacgtgttgatcggttgaagaagatggaagctaaaaagattccggatcggatcgattatgatgcgatcgacggattagcgactgaggctcatcagaagctaaagaagattcagccgacaacgattgcacaagcttcacggatcagtggggttaatcccgcggatattgcaattctgagtgtttatattcaacaggggcgaatcgctaaagttcaataatcatcagtagtaggttatgactggtgtgttcagttgatattaacgaatgatgaaagaaaaaattaatatttttaacgataaagcacaattccaacttggaattgtgcttttttagtgagcttactttttaattagtacacgtttcattaaaaaaacaacaacactttaattaatgatgactaaattaaattaaggtattatacttcagaactagtaaatattgtttacagtgtttacaaaataaagggggagttattgttggtaagagttagtaagttagtcagtggtattttagtggcaagtagtttattagtgagttcgggtgtcatcgctcaggcagatacgcctgctgctcccaacgcagatagtacggccaatacgactggtacgactgatattcaggcgatgtttaaaggaaatagtagtccggtatcaccagttaatccggataatcccaataagcctgataatagcggtgatagtggtaacggtgctaaagccggtggcggcttatcgctgatctacgtttctaataaattagattttggaagccatgagatcgatgttttaaatccagaaacgtacactgccgcagaaactgattcggatttatcaggcttatggaacaaaaaagcagtcacagaagtatctgatgtccgaggaagtaatgctggttggacactggccgttgccgggagtagtttgactggtacagacggttctgtaatgaaaggggcaacgcttcagctaccaaaaggtacggtaactaattctggtgcaactaataatggcgtgcagtccactgaggctcttaatgtgttagatggtaattcggcgacagtattatcggcagcgaaagatcatggtgctggtgtaactgttgatcaaattgatccaagtaatgttaagttaacggtgccggcaaacacggctaaagcgcaggggtaccaaacaactttgaactggagtttgagtgatacaccagcaagttagttagaatataaccaagaggggaagctaaagcagatggcgatggctaacggttattatggataaagtaatcgttgatgtaatcgcgagcagtggcttcccttttattaaatgatagctttaaaagatgcgtcataatatggggtgtgttgagattgaaagtggttatccaattcataagactaatgggtgtgagtcttggatttagtattttaatcggacagacaggagtgtcggctaatcggcaacaatcggtccacaacaacaatgtcggttttagtgttgccgctgagataccaaaaaatcagattcataaacaaaattctttttttgatttgaaaatggcaagcggtcaacagcagacgttacggacagtcatttacaatgtcactaataaggatattaaggttcgaacggctattcataccgcgtatacgaatattaatgggacgattgaatatattaatccggccaaatcgtacgatcagtcgttaaaataccgagtcagtgatttagccacaattcagggtgagcggacaataacgattccggctgaaggctccaaaacggtcgcaatcaaggtgaagttacctaagcagccagtaaatggcgtcttgttgggtggatggtattttaaacgggttgatgacaaggtaacaggagtaacggagaaaagtatcaacgttaagaatgagtattcgtatgttattgggttgaaattattttcaggaaaattgccaattcctaatttgtgtctagggccggtgaaagctggcttgaacaattatcatcgaagcattattgttgcgctacgtaatcctgtcgcaagaattattccgaatttaaaaatccgaacggtgattattaataagcggcatcaaaaggtcattattaagaatacgaaaacgggtgtcatgatggcgccaaacacagtttttaaagcaccaatgccattaggatcacaacaattacaaccgggtgattatcagttacaaatgacggttaataatcagcgtcatcattggcgatttaaacgagattttcatattagtatgacagcagctcaaaaatataatcatgagtcaattgataataagggggttagtatgtggatgctaattggaattggcgcaatttcaatgctagtactggggttagggttaggcgtaatcgtctggctatggcggcgacaacggcggtcgaaggattaggttaattaatgggggtaggatggtgcaacggtttagcgtgtgtgtagcaaccattttaatcagtttaataatgttcacaataacgggagttgcggccgttggggggcggtcaacagtcaccgttagcttttatgctggtcagagaactcagcaacagatagataatcgcaacgttaagattcctaatggaaccaggccatatcgtgtggtgacagaaaagacgttgacaagaccaaaggggtattatcaattaccacagactgatgagcagctcttaacctggttttatgcgagtttcggtagcgtgctactgatattattgatggttatccgttggtttaataaagaaagctattgctaggtaaggagggaccgtagaagtgagaaggttacttactggcacgttggtcgtgggtgggctgttattggtagtttgcctcatggctgttaatgggcaggcaaaggttgtcgatgagccgaccagtgcgatgcaggatattacaactaatttcgaacaacgaacaattggtcgagtgccatggcccattacacacattgcggctaattatgtgcgagatggtcacatgacgcacaagactagtcgagtgaaaattactttagggaaaggtgtagtacattcgccgaatggtaagggattatataatttatgggatctggttttgaatcgccaaggcaaagagtatggcgcaactttcctggcgtataatatcaataatcgagtttggcgaccgcatcgaacagatactatcaagacgcatggaatcaaagcaggtcagccggtttggattggtaataagagcagtactaatgcgagcagtaatcccattcgaacactgcctgcttacatggtaacgaagcagtactgtcaaatggttagtcagattaaattatcaccacatattactggatttgaggctaataagcgcatcattaccgggacgggcacacaaggtggtgatctaatcatggctaaatttggtaatcagatcaaaaaaacacgagtcgatcatgaggggcgctggcagatgaaatgctttagcggtaatggtcacttgatggtaacggaaacaaatgcgtatgatgatattccagggcacactgaaacggtgattaataacggaactccacgaacggatgcgacgattaagctcaacttgtttttaactaatggtcataccttttcaaccgctaagggacgcaaggtattagtgaccggaatgatcttggggactgatcagaatgattttgatcgcgatgttgttttaaaaaataacgcactaaccatccactttgcccatgctgatggaacgcccatcgctaattataaggctaatggttcggtgaatgagccagataaggcggggtattttcatctgaaattacccactgaatcgcttaaacaagggcctaatgatgtgaaagtgtgggtgtcagatcaacacggccaacgatctaatattgatacgttaacagttaatgtaaattcaggactcatgtttggtcaaatcaatgctcaaatgcgttttcggagtaacacgattccacaaagcgagcgcttattatcgcccacaaatcagtggcaaattgaggttcatgatacgcgatcagttgcttcaaagtggtatgtgtatgccaccgcaactaaaatgaagtctgctcaacactcattaattggggatttggtctatattgatgctgctggtcaaaaacatgtgatgaccaatcaggaaacgttggtaggccatggcacacatacaaatcctaatcaacaaactacaaatattgcagcaacctggcaagcgcgacaaggtatttttctcgatgttcagcccgaattgtatgcaggatcctatcatggaaagatcaattggagtttgcaagatacaccacaatcttgatgagtggaagaaagatgtcatcaagatgtgttagttagtcattaaggaaattatgaatgaccgtcaagattgttttggcggtcattttagtgtgatatcgttgcaaggttacttataaatttgtaaaaacgattcaccaataccagacaagctgagttgattggactataatgattggaagttatagcggggtaagggagaacgtttgatgaaaacttttaagagtattatgagctgggtactaccaattgtagtggggttactcgtcgccatggtgatcaggcactttatttttacgatggttcgggtggatggaccgtcaatggaacctaacttagatgacaatgagcgcgtcgccgtggtcaagacagctaagattcagcacctcagtgtcatcgtttttaacgcctatcaagttgatccagacgcacgctccaagacggtcaaatatgtcaaacgagtgatcggaatgcccggtgatacagttaaatctgaagacggccgactctatgtcaatggcaagcttgtcccgcagaagttcatcagtcagtatgagcggacgcagggaacgacaaattgggatttgagtacgctggagaaccgttacagttggaatctgaaaacaactaaggtccctaagcattcgtactttgtgttaggtgatcatcggtcagtgtcaaatgatagtcgttactggggatttgtcccagccaataaggtattgggcgtggtcaaagtgccattttgggactcgaataaaactaagcgccataatattaattcaattagttactgaatagcagccagcgcgactcgttagtgagcgcgctttttttgtatgctcaccaactgaattgtaggggggaactaagttggttagtcattctttacagggagaacaacgtgggatggttaaagtgactaatgttgttcagaaaagcaaacaaaaggtagcatctaaattgaatttaatggtcaataagcctagaataatggcaagtatcacgatggaggctggtaaatatggcaactgaactaacaccggatgcacttgccgctttacggacaacgcatgcgcaggatcgaatggcaccagtattgacgcgagcgattacgaagaatgggattgaggctgcaagttttgataatcaagctgcgagtcgcttagcgcggactttttctgttgaagtactaacgggtaaggtcagtaatcagaagcacagcggtcgttgctgggagttttcattattaaacacgctccggcataagtttgcgacccggtatcacgtcaaagactttgagttatcacaaaactatttgtttttctgggataagattgaaagggctaatattttttatcggaatgttgaacaaacggcgcgtcagccgattgatgaccggcttgttcggttcttatttgctaatcccggcgaagatggtggtcagtgggcgatggcggccagcttggttcaaaagtatggtgtcgttccagctagtgtgatgccagagtccttcaacactgataatacgacggcatttcaagccagtttatcacggcagcttcgtaaagatgggttaaaacttcggcaactcgtgatggatggtgcaagcgaggccgagctacaatcactggagaaatcaatgttgcaaacggtctatcggatgacggcgtactcatttggtgaaccaccaactagctttgatttagaatatcgtgatgatgagcaacagtaccatcgtacggctaatttaacgcctcagcaattctatcaggactactttgaaactgatctggatgattacgtggtcgttactaattcaccagataagccgtttaatcgactttatagcttgccagacgaggataacgtgattggtggtaagcctatcgaatttttgaaccttgatatgggtgtgctgacggacgttgctgtgcaacagttacaggctggcgaaacggtttggtttggcaacgatgtgttgcgacagatggaccggaagacgggatacttggatgcccatttatttgaaactggcaagttatttggaaccaacgatcatctgactaaggcgcaacggctgttaacaggtgaaggtgaagttagccatgccatgacgttaaccggcgttgatttagtggctgatacgccaactaagtggaaggtcgaaaatagttggggtgagcaagtaggtgatcaaggctacttcgtaatgagccaagattggtttaatgagtacgtctatgaagtagttgttcacaagcatttcttggcaccggaatttcaggcgctgcttaacgaacgtgcacagcggctacccgcatgggatccgttgcactaggagggtaatgtgatgggaatattttcagaacgattaaaagaagcgatgcaacaagcgaacataacctctgctcagttatctaaacaaacgggaattggtcgttcatcaatcagccagtggttaagtaataaatacgtggctaaacatgataaggttacggcgttagcgacagtactgaatgtgtcgccagattggctgctaggtacgactgatgttgcaacagcggtggccccggaagcggtaccgattccagtatcggtcacgccaacccctgccgttgaccccgaattaataacattgtgggaacagctggataccaaacaacgatctaagttgatcaaaaaggcacggaagttgttgactaaatcggccgaacagcccaacacaaagcggaaaaagaacaagaaaaagaaaaaaggcaagaaacggaaataaggcaatgcaaaaaacaacttttgctcctcagctcgtcgtgaggagcaaaagttgttttttgactgtcatgatgaattatcaggggttgataatggtgaactaaatggtccatttttcccagtcacgcgcccaaatcagtcccatgacgccttctccaacgtgaaccccaacgacgggaccaatctcgccttcatcgatggtgagatcaggaaagctagccttcaagtcagctgtccattcggcttggagtttcggattgttgccattttcgattgtgacgcgaagtggatagtcaacggcagcaatctcagcagccagcttggctttgatggctgcgtatgcccgccgcatcgttcgttctttttgaatagcgacgatcttgccatcttgaaaggtcagaacgggtttaatgcgtaagaggttgccaacgagtccagaagcgtttgagagccgaccagtccgaaccaagtgactgagattatcgacaacaaaatatacgccggttgtttcacggatttttttgagctgagcaataacttgttcgggtgagtatccttcagcgactaatttagcagctaacaagaccatgtaagcttctccaccagccgtaattagtgaatcaaacggataaaccttgatgttggttacgtttggcaggtaactttcgagattagtaataaagctggtgataccagaagaaagatggatactaatgacagcatcatagcccgcctttgccagctgatcataagtcgtttgcatctgaccaagggtaatctgagtggtcgttggtaactcaggcgcggtacgcattcgttcataaaattctttggacgttatttcgacgttttctaagtaggtttggtgaccaaaaataacagtaattgggacgacgtgaatatgatacttttcaacatcggccgctgagaggtagcttgcgctatccgttacaattgcggttttcatttttcccccgctttcatttggtgaaagtattgcctaacattataacgcttgtcagtagttgaaagctagctttgatgaatagattaaggcgattaatgtttgaaattctcaacaactaacgtcataatgagaatcattaaatgggggagggcgcaggatgaccaaacgaattgagataaaaccggcaacagctgcggatcaagcagcgctggctgaaatatatttagtggaccgtcagcaagattttccatgggtcactgatccacaactgcaagattttaacgaagacagccgtggtgaattcgtgctggtcgcgtggattgatggtcagcgggctggcttttgttcgttgtaccggctggccaacttcattcatctgctttttgtggccccagatttccgccacttgaaagttggtgaacggctactgacagaaatgcgccagtatgcaaccgaaccactcacgttgaagtgtgtgatggccaacgaaaatgccctgcgattttatgcgcaagtagggtttcgaattgtcaaagcagatgcggacgcgctcccaccaaattatacgttgcgtgatacgcatactgagcagtacgtggcattagtggatgttatggccaatgaacgcaaacttaattaatctaatttatttttaattttaaggttgacattgtgataatctggcgctagaatctaatcattaattaaatttagattaaaaaccgtgataaggaacggtgctaagctggttagttagcgagctgcggattggtgtaaggcagtcaataccacttaacatagatcaccttggagttgcgcctcgaaattcgtggagatggtgctggatggtacccattaatgtaccggcgtatcgcaattgctgtacgtactaaggtgactattgtgaagtagtcgcgaataaaggtggtaacccgttctggacgtcctttaattaactcataggagttagttaaaggacgtttttttatgatttaaaggtggtgaggagtatggaatcggacattcaggtggctagttaccaacaaatgtgggcaatggtaactagtcgcacgaggacttgctcctcgagtaacacataggtcaacaaggaatcaaaaacacatagtataactgagtactccgggtagatcacatacgataccacgtgtatcgattaacacatagttttagcaacgtgcaatttatacgtttaggcacacatagttttaacatgaacgatatttatgacccgtagtcttaataattcgtatttaagacgcccgtacaattagctggcgcactgaatacatccaaataatgaagtgacaactagattaattgtaatgagttaacgtattagcaatggttagacggcctcattacgaacacatattaggataacagtaaccacaaacacataatggaggttttataatgacaactaccaccacagaaacagaaactcaagttgcacaacagctatttacggcctatcagacacagcatgcgttaacaatggctgattttacaagtagtgtcgttgacgaagacgctgcgtatcgagttcaagccgcattaacggccttaaaacagcagccggttggtggatacaaggtctcgttgacgagtgcggaaactcaaaagatgtttgatgctcatacgccgctgtacggtgtccaggttgcggatcactttttggcggcaccaaccacggttcgacgcgggcaactaatggacccactcgtcgaagtggagttggtctttaaggctaaagaagacctgtcaaccaccgattcattgaccgatttatggcaaaaaacgactgtcgcgccgggacttgaattgccagattcacgttttgctgactggtttcccgatttgcctaaaaatttggtggtcgcggatgccgcagtcggtgggctagtggtatatggaactgaacgagagactgccgagttgttcgcttcagctgatgcagtggcaacgtcaaagtgtacgctagtccatgatggggggacggttaaaactggtcaagcgagtgaagtgttgggtaacccgcttgagtcattgaagtggttagtcggcaagcttgcagagcaaggtaagacattaacggctggccaacgagtttcgtcggggacgtttgtcctaccaccacatttgaccgcggggcactggcaagccgacttcgatgccgggctgggacaggttgcgctggatgtaacagaagcctaagtaaaataatcacgaaaaaggccttcataaatgtcatgacatttatgaaggcctttttgaagtgttgctaaatgaatgtttttcagatgattagtaattttcaaagattggacagactgctaattatccaatttgtagaccagaatgtttcacgtgaaacattacttatttaaacgatggtagttttgatcaaagtacttgccgttgcgaatatcattcggcatttctttgtaaggtgcttcactgattatatcttcattgttttggccggcgtcgcccatgtaagtaatattggcaaattcgggtacaactagttttggataagtggcatacttttcacgagactgttccattaaatcgatgtgttcgttttggtaagtgaccgtaatttcagggtgttcttcaacccactttgggaagaaaatcgtaccgtgtagtttcttctcattgggcatgaagtctagtgcaacgtcagtcccagttggttcagtccaagaaattttgtaaatgccttcggtcaacatgacgatgtcagctttttgatcagtgacccaacgaccggcaaccatcccaccgtggattcggtaatcaacggtgtggtcgttcttggcgtaccactcgtattcccagccgttatcataagtgtagataaagtgtgtgccgagaaagtcatcaagtgttttaaaagtttttgtcattagaattaccttccttatgtctaatatgtcattttaatcatgtaatttattacatgttttaaacaacaaggttagtgtatactgttatcaaggaatcgtcaaggaggaatttccaatggcgcaaaaaaacaagttacaatttattattctagggttattaaaccagcaaccattaacgggctatgatctaactaaagcctttgatgacgagatcggtgaattctggcaagctcaacatagtcaaatttatccgcaattgaagcgactagaagaacaaggttacgtcacgcatgaaattacggtcagtggcgaaaaacttgaaaagaaactctaccacatcaccgcaactggtcggcagctgttacatgagtggatcagtgtcggtacaccagacttaaccgctacgaaagatgaatttattttaaaactatactttattcaaacggatcgtgatccacgcctactagcgatgttacaggaacagctcaccctgcacacagctaagttagcacacttacaacagcgattggcgaccgttttcccgcaagctaaagctgctaagcaacattatggtcactatttgatcttacaacatgcgatcggacgagaagactactatgtgaattggttgaagcagacgttgaaagccttaccggagtaatggggagagtgctgccgttctaactggtggctggaatcatagcgttaaaagctacccttaattatttagagcggcgtttgaaggaaatcagcttatgattatatgcgtgtgagaaatggtgccgtttgaattctgaaactggtataatggcagtggtcaatatcaattcacttcaatgaggagattaactatggaaaatcaaaaaatgcaagagccacttgtctatcggcgaattttactgaccgttgatgaggacgataatacctcttcagaacgtgcgtttcgatacgcaacgactttggcccacgactatgatgttccgttaggaatttgttcggtgctggaaagcgaagatatcaatatctttgattcattaacaccgtcgaagatccaagctaaacggaaacacgttgaagatgttgttgccgagtacgttcagcttgctgaacaacgaggcgttaatcaagtagagccgcttgtctatgaaggcggtgatgtggatgacgtcattttagagcaagttattccagaatttaaaccagatctattagtgaccggtgccgatactgaatttccacattctaagattgctggggcaattggtccgcgtttggcccgaaaagcacctatttcagttatcgttgttcggtaatcaagactcgggacagggattaagatccaagctgatgaaattttaacaaccgcaagctcatcatggctaatgaggagcttgcggttgtttttgactgctattgttcattaatgaacttaacaatttaatttttttgttggctataaatactgctaaacatgagtttataagtgtactgtttggatgatattaaataatttttcaaattcttgttgcattatgagcaaggatgactataataaagtttgtaaattaattcacaaaggaattgaacggaggaagcacttcatgattaagacagaaaaaaatcaaacaagcaaagttactgatgaagttgatcaattagttcaacgttctaagaaagcattagctattttgaagtcatatacccaagcacaaatcgatgatttatgtgaaaaggttgcggttgccgcactggacaatcatatgaagttagccaagttggcggttgaggaaaccggtcggggtgttgttgaagataaggcgattaagaacatctacgccagcgaatatatctggaacagcatgcgccatgataagacagtcggcgtcattaaagaagacgatgaagagcaactaatggaaattgctgaaccagttggtatcgtagccggggttacacccgtaacgaatccaacttcaacaacggttttcaagacgttgatctcattaaaggggcgtaacacgatcgtctttggtttccatcctcaagctcagaaatgtagttctgcggctgctgatgtgatgcgggaagcgattaaagctgctggtggtccagctgatgctgttttatacatcgaacacccaagcattgaagcaaccgacgccttgatgcaccatacggatgttgcgacgatcttggctaccggtggtccaagtatggtgacagccgcttactcatcaggtaaaccagcactgggtgttggtcctggtaacggcccaacttatgttgaaaaaacagctgacattaagcaggcggttaacgacattgttttatcgaagacgtttgataatgggatgatttgtgcttctgaaaatagtgccattatcgacaaggaaatttatgctgaagttaaagctgaatttattcgtttgggttgctactacgttaaacctaaagatgtgcaagccttgagtgatgctgtcattgatcctaaccggcacacagttcgtggtccagttgctggtaaaacagcttatcaaatcgcacaaatggctggcttgaaagatgtcgctaaggactgccgggtcttgattgcggagattaatggtgtcggtatcaagtacccattatccggcgaaaaattatcaccagttctgaccgtttacaaagcggattcgcatgaagcggcgttcaaacgggctaatgaattacttcactatggtggcttaggccatactgctgggattcatacgaccgatgatgcattggtcaaagaatttggcctacaaatgccagcttgccggatcttagttaacacgccatcttcagttggtgggttaggtaacatctacaataacatggcgccttcattaactctgggcacgggatcatatggtggcaactcgatttctcataacgttacagatatggatctgattaatatcaaaactgtggcaaaacggcgtaataacatgcaatgggtcaaaatgcctcccaaagtctacttcgaacgcaattccgttcgctacttggaacacatggccgggattaagaaggttttcctagtttgtgatcctgggatggttgaatttggctatgctgatcgagtaacggcggtcttgaacaagcggactgatccggttgatatcgacatcttctcagaagttgaaccgaacccgtcgactgacacagtctacaaaggggttgcccggatgaaggcctttaagccagatacaatcattgcactcggtggtggttctgcaatggacgccgctaaggggatgtggctcttctatgaacacccagaagcttccttcttaggtgctaaacagaagttcctggatatccggaagcggacgtacaaagtaccagtatccgaaaaagtaacttatattgggattccaacgacttctgggactggttctgaagtaacgccatacgcggttattacggactccaagacgcacgtcaaatacccgattacggactacgcaatgcaaccagatattgcgatcgttgacccacaatttgttgaaacggtgccaaagcggacgacggcttggactggtctcgacgtaattacccacgcaaccgaagcatatgtttcaacgatggcttctgacttcacacgcggctggtcaattcaagctttgcaattagccttcaagtacttgaaagcttcttatgatggtgacaagatggctcgtgagaagatgcacaatgcctcaacgctagctgggatggcctttgccaatgccttcttgggtatcaaccactcgatcgcccataaattaggcggggaattcaacttaccacacggattggcaattgcgatcacttatccgcaagtcgttcgttacaatgctgaaatcccaacgaagttagcaatgtggccgaagtacaaccataatactgccttagccgactatgccaacattgcccgggccttagggttaccaggcaagaccgacgaagaactcaaagaaagcttagttaaagcttacattgacttggctcattcaatggatgtgaccttatccttgaaagccaaccgggtcgaaaagaagcactttgacgccaccgtcgacgaattagccgaactggcctatgaagaccaatgcacgaccgctaacccacgcgaacctttaatcagtgaattaaaggcgattattgaacgtgaatgggacggccaaggtactgaaaaatagccctttgtgaattaagggagcccgcgctcatgatgagcgcgggcttttttgtcatgtggttttagaataactacctggaaagtttttactgtttgttttcagaggaggagaaaatgaagacttgatatggataaattatcggcttgcacactatatagatatacttataggtgtactaaatatttttgagattcggttaggaaaattcggcgttctaggctacaataatgcaagagttaattttacggaggagaagcccatgaaaaataaggcagtcacaatcaaagatgttgcgcgccttgcagaacgctcaattgcgaccgtgtcacaaattttaaacgggcatggtgataagtttagtgcggcgacggttgctaaggtggaagcggcccgggatgaattaaattatgagcctgattactttgctcagcggatgattaagaagaccagcaaaacaattggggtccttgtgcctgatattcggaatcccttttttggtgagctgcttcgaggcattgaaaacgtcttgtatcagcaaaatttcatcacgatgttgtgtaatgctgatctggatgaagacaaagaacgcgtctatttggatgaactcagccgccggggtgtggatggctttattatcgcaagttcggccgtttccaataatgcgattaatgatattctacggcagaagggtcacccatttatcgtcttagaccaaaagcgcgccgaagggttcagcgattctgtgttgactgatgactatgatggggggcggcaagctgctcaacacttaaaagatttgggacaccggcaagtcgccgttcttattccagcaaaaccgtcagccaatgtccaaaagcggcttagtggtttttatagtgtgtatccgcggacagcggtacatgtcatcgcgacgccgctttctaaagtgggtggtcgccaagttgttccggaaattttggcgactggagttacggggatctttgcagtcaatgacgaaatcgcattcggtgtatacttaggcatggctgaacatgataagcggataccggatgattacagtgtcattggctatgacgatgtcgaaatgtgccaatatgtcgcgccacagcttacaaccatcgcacaaccgatttttgagttggggcaaacgacagccaaccagttactcgaccgtattgctaatccgcagcagccatgggaagaacaccacttaccagttaaattaattgaaagaaattcgacggcacatttgaattaattattcagatgtgttatattttttacgagttattaaaacgttttcataaaacgttttaataaaaactaaattcagattaatttaactatttggagggaccattatgaatacggtaaccgttattgggagtatcaacttagaccggacgattcgggttgaaaacatgccaaagcctggcgaaacgattcacactaaggaaatcttttcagccggtggtggtaagggcgcgaaccaggccgtcgcagcgcaacgttctggtgctaatacccactttattggtgcggttggtgacgatgctgctggtaaaaccatgcttgatttattgacgcaggaaaagatcaacttggcagggatcacaaagatgactaatcaatcgacaggtcaagcttacgtcacggttgatgatgccggtgaaaaccaaattatgattcatggtggtgccaacatggcctttacgccagcagacgttgaagcccaccgtgatatcattgaaactagtgattttgtggttgcacaatttgaaagcgctgtcgatagtacggtcgaagcctttaaaattgcacaggccgctggcgtaagaacaatcttgaatcccgctccagccatggaaaaagtccccgctgaacttttagcagttactgacatgattgtaccaaatgagacggaaacggaaactttgactgggattgcaatcaccgatgaagccagcatgttaaaggcgtccgctgcattacacgccctcggtatttcagctgttatcattacgattggtagtaagggtgcgttttatgatatcgatgggcgacatggtatcgtaccagcttttaaagtcgaagccgtggatacgacttcagccggagatacgtttattggcgcgatgagtagtgtgttaaataaagattttagtaatcttgaagatgcgattcgctatggtaaccgggcgtcatcgattgccgtacaacgtttcggtgcgcaaccatcaattccttataaaaatgaaattacagccgcggagggtaaataattatgaaaaaaacaaaagttattaattcagatttgtcacgagttattgcaacgatgggccatttcgataagttgagtattggtgatgctggcatgccagtaccaagttcaaccgaaaaaatcgatttagccgttgataatggtattcctagttttatgcaagtcttgaataacgtcttggaagagcttgaagtacaacgaatctatttggcagaagaaattaaagttcaaaatcctaagatgttgacggccatcaagaagcgcttaccagacaccccaattaccttcattccacatgaagaaatgaagaaggacttggctgactgcaaggcctttgttcggactggtgaaatgacaccttattcaaatattttattggaaagtggcgttactttttaaagtagttggtgattaatggagggattggaatgaatactaccgctttactaattggcttagggccgttacttggttggggactttaccccacgattgcgtcgaaaattggtggtcggcctgttaatcagatcttgggttcaactattggaacgttaatctttgcgctgatttatgcatgggtgcaagggattgcttttccaagcggcatgaatctctggttttcaattctatcagggatcggttgggcaagtgcccaaatcgtgacatttaaagtgtttacgatggttggttcttcacgagcaatgccaattacgacggccttccagctgttgggcgcatcactgtggggcgtcttcgccttaggtgactggcctggggcaatggacaaggtcttgggtggcctagccttagttggaattatcattggtgcctggctaacagtgtggtctgaacataaggatgcaggtaacgcccggaccttacgccaagctgttatctggttagcagttggtgaaatcgggtactgggcttattcggctgcgccccaagcaaccaatattggtggggaggaagccttcgttccccaagcaattgggatggttattgtttcgatcgtatatgccctgttcttagcatcacgaggtgaaaagttagccctcgttgaaggggtgtcatacacgcacatcatctcaggtttcttcttcgcgtttgcggcgttgacttacttaatctctgcgcaaccaaatatgaacggattagcaaccggctttattctttcacaaacctccgttgtattggcaacgttaaccggtatttggttcttaggccaaaagaagactaccaaagaaatgtgggtcacgattggtggactgatactaattattgcggcagcagctgttacggtgacgatttaaaacaaattaatatggctataagactatttaatagagtcgctttgaaggagttatacgcttctttaaagcgactctatttttacggttattgattacaatggtcgattacaaaatttgctttatgatatggcgataatgaaaataattcggcataatatttatagtttatatcagacatctaaatgtttgatgaatcattagtccattaatttaaaaagccaatgaaaaaagagtgcattaataatgtatgcgctttcgtatatatttatctgtgaagaaaagaaatgattaaggagcgattttgatgaataattcatggattaatatttcgggtaaggtatacgttgttactgggggctcatccggtattggtaaagcaattgtaactgaattattgaataacggggcgattgtttataatgctgacctcaatcaaggtgatcagcaaaatgataatttacactttgttgaaaccaatgtcacagatgcggaagcggttaatcggctggtcttaaaggttgttgatgaacaaggaaaaattgacgggcttgtaaataatgctggtatcaatttgccacgtttattggctgacgccaaggatcctcacggtaagtatgaatttgcagaatcggattttgtgaaaatgtttgccgtgaacgtgaaaagcgtcttccttgtatcgcaggcagttacccatcaattcgagaagcaacagtacggtgttattgttaatatgtcctcagaagctggacttgaaggttcacaaggacagagtgtttattcagcaactaagggagcgattaatgggttcactcgttcgtgggctaaagaattaggtgaacataatattcgggttgttggtgtcgcgccaggtattatggaagctactgggctaagaacacgctcttatgaagaggcgttagcttatacccggcataaaactgttgatgacattcgggcaggctataagagtacgtcaaccacacctcttggtcggagtggcaaactatcagaagttgcggatgcagttaactatttactatcagaacgtgccagttacattaccggggttacgattaacgttgcgggaggcaagagtcgtggttaacctttaaattttagttgggggcatggtgaggcaatggataggcaaagttttgaaatattaaacttttttattaataatgatgcattgacactaagagaattacaatcccatttttctgtttcgagagtcacaattaccaagaatattcgtgcaatcaatgattatttggtgggtattgcaaaaatcaacgttaatcaagccaagttttacctagttatcaataattattctgccatggctaagctacaaactaatttcttgaaaaaggatttagatttcaatgatccctcaaagcgacaagcaacgattttaaaagaattgttacagcaaatcacggattacgttattctggatgatttggcagaatcattggctgtgagtcgtggcactatcaataaggatttaaaagcgctcaaacaacagcttgattattaccaagtcagaattgagacaaaaactaatcgtgggattcatttagcggttgaacatgattatatgtatgcagtaattacacgaactttagtcgggaaatactacgaactggaagcaacctgggataaagcgacagatgtcaaattgcttaatcttgttaaaaaacttgatcataataatgatactgtgaccatgattaaaagaaatattgcggttgttaattggttacgtaaatataacattcaaatcaatgatcgtattaataactatcatccacttcttagtgatgtaacgatggcgtccttgcggaatctagttactgagataattggtagctcgttaagcactagcgaatgggaatttatttcatacccattaaacatcagaaagctaccgaaggatgataatcagttagttcaagtgggattggtcgaagttgaggatttaatgcagtcggtttttccaatccttaagcaaaaattagatgtgaatttggactttaaacggttgttgatggagttgcgatatcatttattatttctcattaatcgggctatttttgatgtcaagtcagaaggatttatctcggtagacatgttaagtaagtatccagtttcaacggagttagcgcaattaacattatcaaccattgccactaaattgaatattcggattcgttcccaggaggttggttatttaacagtctattttcagatggagcttgaagaatacatggcagcgccaattattcatcgggttgcactagttgagcccattaatactagtatgaaaaagtttatttccgagaaattgaaagaaatgttagatgatgatttgcagattgatgtttttaactcaattagtgaatgggagcagagtccagaaaaatatttactgattttttctaacagttttttaacagataatgaattaattaaccacgcgcctattattcggttgaattctatttttaatcaaggaacgttacgtgaacgtcttcaaatttcgttggttgatgaagctgttaatcagggacagtgtcgatttgatgtcacgcagtttgaggaacaggagacctacgtcactggagtgaaaaaattaattaatcaagagatacaacatggtcaactgacaccagattttatgcaagcttggcttaatagagagcaacaatcgagtagtatttttggtgatggggttgcattgccacacgttattgataaatctggactaaatcgaatccttgtaacagtaggagtgtttgaaaaaccggtagtattcgataatcaaaaggtaaacgtggtttttttggtcgcaattccgtataaactagatgcaacattaagcaaaatattagcacaagtatacgatctaattcgcagtatcacagctaacagcaatatttataataacttgaaaaattatgatgaaaatcaaggattaaatcagttgatggaggcgatttaatgttaatttattttggcgtgatcctagtcagtgcgtttctattacaaggtttccttggactaagacaaattaagaatttttctaaaacctttcatcaattacgagtgttagcgccagtagcaattggcaaaaatcctaaaaaattacggtcggggacactaattctattagcgataaaggatgacggcacgatcttagaggctcaaatgatgaagggggttacgatttttgcaaagtttagggaattgcatcaactgcggcagaaaaatattgcggaaattgctgcttcataccagcaattaaaacaattcgataagctaacgcgagtttgtctattggatgcctataagaactatttaaattacaaagcaaatcagctaacgccacaagatttcgatggtagtgtcaaaatttggagcctaccaatgattgaaaagctgaaatctatttattataaaggcttagcaagtttgcgaaaaaaacaagtgaacgtaaaggagcattaatactatgaaagtagtcacagatttggcctcgggctttatggggctgtttcagagcggtggtaagacattaattggatggatgacatcaattattcctgttgtgctattgctgttagtcttgatgaacgcgattattgcttttgttggtgacaagaagatggccaagttggccagagcttcgtcaaagaatcctgtaacccgttatttaattttaccgtttgtttcggcatttatgctcggtaatcctatggcgcactcaatgggacggttcttgccagaatactataaacctagttggtatgcatcgattgctcaattttgccacactagtaatggggtattcccacatatcaatccttccgagtatttcatttggttagggattgcgcaaggggttcagaagttaggattgaatacaatggatttggcgattcgatatctattagtcggcctagtaatgaactttatcggtggttggattactgactttacaacagcctatgtctgcaaacaacaagggattaccttgtccaagaaagttgaatttaacggctaattgagagagtgaggaacgagatcatggcaaaggaatatcatagtatcaaagttgttaaaggctctggtggctggggtggcccgctaattattacaccaactatcacgaagcataaatttgtttatgtcactggaggtaataaaccagcaattgttgataagattgctaagttgacaggaatggaagctgttgatggctttaagacgtcaattcctgatgaagaaacagcattagcggttgtagactgtggtgggacattaaggtgtggaatttatcccaagaagggtatcaaaacaattaacgtattaccgactggtaagagcggtcccttagcgcaatttatgaatgaagctaattatgtttccaatgtagatgttgatcagattatgttggtaacatctgaggaggcgcaattttctgatagtcaaaatgaaagcgctaaccaatttgaggatgtagatgacgatacgaaattcgataatacaaagacactaacagcacaaacaaaaaatcctgggatcttaactaagattgggattggtgctgggcgagttgtttcgacgtttaatcaggccgcaaaagatgctgttcaaacagttattaatactattattccatttatggcatttgtggcattaattattgggattattaatggctctggaattggtaaggtttttgccagtgtcatggagccgttagcaggcaatgtctggggcttgatggttttaggatttatttgctcattaccattcttatctccattgcttgggccaggcgcagttatcggtcaagttatcgggaccttgattggcgttgaaatcgggaaaggtaatattccaccacagtatgcattaccagcattattcgcgattaacacgcaaaatggttgtgactttattccagttggcttaggactagctgaggctgattctaagacggttgaagttggggtgccatcagtgttatatagtcggtttatcaacggcgttccgcgggtctttattgcttggattgcaagttttggattatattcaaaataaatttttagaaggtttgaggtgtattgtatgatgacaaaagagagaattatcttttcaacaaaggtcttagaaataggtgcggaatctgctgattttaaatcgattggcatggcagtattatttggtgatgaagctccagacgcattacggccttcttgctttattatcgaagttgtcccaataagtgagcaaatcacagcaggaatgaaacttgaagtcgacaatcaagtctatcaaattacagcagttggtggtgaagtccagactaaccttggaagattaggccatacggctattagttttacgggtgcaaaggaggctaaattgcctgggacgttatatgttgagcagggcgattatcctgattttaaagttggtagcgtggtacggattatagctgaataattaacttggcagatgttattttgctctgtgtcgagttgagttaaggtcatgttttgaaagcggtagttagttttcgaagaatggctagcttctaaacatgcagacattgttggaagtatgcccctgtaaaacatacactaattactaaaattgtttaaaaaatgaatgtatgagatactaactttcaacagcgatggtggttcatcaaggcaagcagactagcgctgttgttgatctacaatgcgtttgaatcgtgattaagtggtaaaaagcatgagtttatgaccacttgaatgtaagcgtttgctatggtaatattcgtttattaaattgtgcgtaattaaattgtgcatgaaatgggggctttattatggttatgaaacaaacaaaacaaactaacatactagcaggtgcagcagttattaaagttttagaagcttggggagtagatcatttgtatggtattcctggaggttcaattaattcaattatggacgcattatcagcagaaagggatcgaatccattatattcaagtacggcatgaagaagttggtgcaatggccgccgctgctgatgctaagctaacgggtaaaatcggggtttgcttcggctcagcgggacctggtggcactcatcttatgaatgggttatatgatgcgcgtgaagaccatgtccctgttctagcacttattggtcaatttggaactactgggatgaacatggatacgttccaagaaatgaatgagaatccgatttatgcggacgttgcagattataatgtaacagccgtcaatgctgccacgttgccacatgttattgacgaagcaattcgacgcgcctacgcgcaccaaggtgttgcggttgtgcaaattccagtcgatttaccatggcaacagattccagctgaagattggtatgcttccgctaatagttatcaaacgccgttattaccagaacccgacgttcaagcagtgacgagattgacacagactttactcgcagctgaacggccacttatttactatggcattggagctcgtaaggctggtaaagaactcgaacaattgagtaaaacgttgaaaattccattaatgagtacgtatccagctaagggtattgtcgcggatcgttatccagcctatttgggttctgctaatcgggtggcacaaaaaccggcgaatgaggcacttgcgcaagccgacgttgttttatttgttggtaataattatccgtttgcagaagtttccaaagcgtttaaaaatacgcgttatttcttacaaattgatattgatccagctaagttaggtaaacgacataaaacagatattgcggtacttgctgatgcacaaaaaacgctggctgcaattttagcacaggtatctgaacgggagtcgacaccttggtggcaagccaatttagccaatgttaaaaattggcgggcttatctagcttcattagaagataagcaggaagggcctttacaagcatatcaagtgctacgtgcggttaataaaattgcggagcctgatgcaatctattcgattgatgttggtgatatcaatttgaatgcgaatcgacatttgaaattaacgccgtccaatcggcacattacttctaacttatttgctacgatgggagttggtattccgggagcaattgctgccaaacttaattatcctgagcggcaggtgtttaatctggccggtgatggtggcgcttcgatgaccatgcaagatttggcgacgcaagttcaataccatttaccagtgattaatgttgttttcaccaactgccaatatggatttatcaaagatgagcaggaagatactaatcagaatgattttattggcgttgaattcaatgatattgattttagtaagattgccgatggcgtgcacatgcaagcttttcgagttaataagattgagcaattacctgatgtttttgaacaagccaaagcaatcgctcagcatgaaccagttctgattgatgcggtgattacaggagatcggccactgcctgctgaaaagcttcgtttagattcggcaacgagttcggcagctgatattgaagcatttaaacaacggtatgaagctcaagatttacaaccactttcaacttatttaaaacaatttggcttagatgatttgcaacatcaaattggacagggtgggttttaaattcagctactatcgatgtcttgaataagtttgattgaattaatggagattatcaaataatcttatgttgcgattagggaaagaagcctaacttatttccttaatcgcttttatgttcatgttagatgtgctaaaataagtaacaatagagatggatatgggaggtgtctagatggctaatacacaattaagtgatgcgacgcatattatggcatatattgcgttgcatactgatgaccagctgaaaagtgagcatattgctagtagtttaaatacggatcctaccatggtcagaagaatgatgagtaagttaagaaaagcaggcttgttaacttcggttcgtggcgttgctagaccaacattagcttgttcgcccaatgatattaccttgaaagatatctatgtagcagtggtggctaagcgtaattttttaaacgttgatcataatacttcggagacgtgtccggtcgggtcggtaattccgcgagtgatggaaaaatactattgtgatattcagaatagtgctgaggcacgtatgtcgcgagtgacgctgcaagatattattgatgacattagcgctgttcaacaacaagcataatttaagataaagacttgacaagggtcaagtttttatttaggacatagttgtgctcagaaaagtaacaacaaaaagagggtaatggaaatgactaaaattaaagcaggacaagcattggcacaagtgttagtcgactggaacattgatcatatctatggtattacagctgactcgattaataacacggtagatgggttctaccaagagaaagaccacttgaagtatattcaagtacgtcatgaagaagttggtgctttagctgccgcggcagatgctaaattaactgggacgattggtgttagctttggttcagcaggaccgggcgccgttcatctcttgaacggattatacgatgccaagatggatcacgtaccggtgctagctttagtcggtcaatcagcaacatccattatgaatacgaacttctttcaagaaatgaaccaagatccaatttttgcagatgtagccgaatttcataaacaagtgacaacggctgaacagattccatacgtggttgatgaagcaattagatcagcatacgcgacccgttcggtttctgttgttattattccagatgatttgtctggtcaagatattgagtttgatggttttaaaacggcttcacttagcggcagtcaacaggtcttaatgccgaaattagatgacgttcagcagacgatagcggctttgaaagctgctcaacaccctgttttatggattggcaagggtgcctataatgcgcgtcaagaagttatcgcagtttctgaaaaatttagtttgccggttttgtcgacggctccagcaactggtattatgccaactgaccatcctaatttcatgggctctcgcggtcgactaggaactaaacccgcctttgaagtctcgcaagcggcagatctagttttgtttgttggtactaactttccatttgcacgttacttgccacaaggaattaagtttattcaagtcaataataatttagcagatttaggcaaacaacatgatgctgatattactgttcttgcagatgcaaaagaatttttccaagcattacttcaatccgaagtgacaattaagccaactaagttcttgaaagctgctcaacgtgataagcaaaactggaaccggtggctcaagacaattgctactgatgatcaaggagggttgacggctgaaggggtgctagaagctattaaagacaatgctactgatgatgccgtctttggtctggatgttgggaataatacggaatgggcaatccgacagttaccattgaataagcaacagacttttacgatgtcggcttggtatggcacgatgggttttggtttgccagcaggtttggccgcccaattgaattatcctaagaagcaggtttggagtatttctggtgatggtggttatgccatggtgatgccagacttactaacggaagttaaatatcatttgccagtcattaacgtggttttagaaaacaaagtattaggctttattcaacatgaaaagttactcgctaatcaggcgccgtatgggattgacttgattggtgctgattgggccaagatggcagacaacatgggtgcgattggttttaaagtgactaaccttaaagagttgaaagcaacgtttcagaaagttactcaactacagcagaatggtaatcaactaccaattgtgattgatgcaaaaattaaaaatgttgatccaattgatactagttttgttccagtagatccagaaaactttgatgcagatacgattgctaagtatcgtgaacgatatggtatcgctgaagcggatcaaccggcacttagccaattattaaatgaattataaagggttatgtaaaggagattagtataatgacagttattaatggatatgaacagagtgatcgtgagcaaaagttaacgattttaaatttaccatcattggaagcagctgctaaaaagatcatcccgagcggaggctttggctatattagtggtgggtcagaagacgaatggactttaaagcagaatacaatggcctttaaccatgttcaaattgtgccacgagcattgacggatatggaacagccaagcacacagactcaggcttttggcatagatctcaaaacgcctattatgatggctccagcggccgctcaaggattggcacatgcacggggtgaagctgcgactgctgaagggatggctcaagttggggcactcatggctcagagtacttattcttcaacgtcaattgcggatactgccgcagctggtaaaggtgcgccccaatttttccaattatatatgagcaaggattggaatttcaatcagagtttattggatgaagcagtgaaggctggtgctaaggcaatcattttgactgttgatgcaacagttgacgggtatcgtgaagctgatattatcaacaatttccagtttccaatcccaatggctaacttgactaagttcagcgaaggggatggtaaagggaaaggtatcatagaaatctatgctgctgcggcgcaaaagattagcccagctgatgttcggcgtattacagaatatacgaatttaccagttattgtgaaggggattcagtcaccagaagatgccttgttagcaatcggggctggtgctcaaggtatctatgtttcaaaccatggcggtcggcaattaaatggtggtccagcttcctttgatgttttacacgagattgcgcaagccgttaatgggcgcgtcccaataatttttgatagcggtgttcggcgtggctcccatgtctttaaggcgttagccaatggtgcagatctggtggcacttgctcggccgattatctatggattagcattgggtggtgcgcagggtgtcgcttccgtagtgagtcaccttaatgatgagctgttgatcgatatgcaactagcgggaactaagacgattgaagatgttaaacgtgctaaattacttaggtagtagaagtaatgctgaatataatgtctgaaatgaatttaaaatacctgatataataacactttagcgttggttttggtggaagtaaattctgctgagatcaacgctttttattgtaataggaagatgttctgaacagaaatagctgaggaactaagacactgattgacgaattgaagctatgccggcgttgaagttaggatattgtcttaaaatgcacaaaaagcgtcctaaagcacccagctgagtttttcaagtcttaaaacggttattcagacatacctggcaatagtatactgtacacatgcgcacataccagttttatttaggaggctgaatgtttcataatctagttatgatgacaaggttgtaatcatgagttttgttgtgagttatttttctcataaattaacttcaaagtttcatagtaattaggatatttagagatcgatttttgattagtaaccatcaatgcatattatactgagctgaacatgaatactagttatttagtttttactgaatagctgactccttaatgtggacttacgccgtcaacaatgagaaaaacaaacacatagattcactgacgaataaataaacctgaattctttgaacgggagactttaatttgagtgttgaaaataattattgtaaattacaacaagcgcatgatcaaaaatgtcgagtctcattacggttttataaaacaaatgggcagatggccgagacagttggctatgtcactacgattgtaccgaaagcaattgcatttatggcaattactggtcatcggcaccttatccaactcaatagaatcattactgtgagtttacagtcccaagaccgccgttacgtcatgtaatatgttttggtttatgattttacacgtgtatcatgattgctagtattgatatttaagtggcaatattaacgataactagttggccttaacttgatactgggtgtgctttttgagtcgcagtctcttaaattaaaattggtctggaaagtaacttgttaattcaagttctttatcaagggctattaaatagggaaccttgtagggaaatcaattcattttatgaaattgatttctcttttgtttaaacaaaattattctaattatttctaattgattctataagcactttacttaacgatacataaaaatcgtgatacgattcagttgtagttttaaaggatattatggtcactaagttacacatataaatttttatggaggtgttgtaatatggcaaatttctacggaaatgatccttttttcaacaatgatatggatgatgttttcaatcaattatttcggcgcatggataatcaaaattcggagcgtgcacggtatttagttaatggacaatcgctgacaccggatgagtttgctcaataccgagcaactggtaagctaccccaaaataataaaacaatagaagtatctaaagatggtaaacaggctgttaaaaaaggggggattttagaaaagttagggactaatttgacggaacaggctcgtgatggattactagatccagtgattggacgtgagaatgagattcaagaaactgcagaaattttgagtcgtaggacgaaaaataatccaatcttagttggtgatgctggtgtaggtaaaactgcagtcgtcgaaggtctggcacaagcaattgtggctggtaaagttccagaaacgattcaagataaagaaatctattcgattgatttatcgtctttggaagcaggaactcaatatcgcggttcttttgaagaaaatattaaacagctagtaaaggaagttaaagcagctggtaatattattctattcttcgatgaaattcatcagattatcggcacgggcgccactggtggtgaagatggtggcaaaggattggctgatatcattaaacctgctttgtcacgtggcgagctgactgtaatcggggctacgactcaagatgaatatcgcaatactattttgaaaaatgcggctttggcacggcgattcaatgatgttgtgattaatgaaccgacggccgctgacactttacgtatattacaaggtgttaaaaagctgtacgaaaagcatcatcatgttgtattaccagatgatgttttgaaggcggctgtggattattcaatccaatatataccacaacgcactttgccagataaagctatcgatttgatcgacatgactgcggctcatttagcggctaaaaattcgcaaactaatgttgagacattggatcaacgcgttaaaaaattagaggcagctaaggaggccgccgttaaatcggaggactttacaaaagccgctgatatcaagaagtcgatcgaggaaaccaagcaaaaaattaaaaaaacggatcaaaaagaaaaaatcactgccacgattgatgatgtggcacaatcggttgaacgtttaactggtataccagttgctgatatgggcgctaatgatattgagcacttgaaaaatcttgataagcgtctgaaaagtaaggtaatcggtcaagatgaagcggttgaaatggtagcgaaggcaattcggcgtaaccgtgcgggcttttcagagggtgatcagccaattggaagttttctgtttgtgggcccaactggcgtaggaaagactgaattagctaagcaattagccttagatatgtttggaaataaaaatgcgattattcggctagatatgagtgaatatgctgatcgtacagctgtgtcgaaattaattggtacctcggctggatacgtaggctatgaagataatgctaatactctaaccgaacgggttcggcgtaatccatattccattgtattattagatgaaattgaaaaggctgatccacaagtattaacgttactgttacaagtgatggatgatgggcgcttaacggatggacaaggcaatgtcattaatttcaaaaatacgattattatcgctacttctaatgctggctttggtaatgaagcattaagtggtgacaagcaacgagatcagtcattaatggataagttagcaccatttttccgcccagaatttctgaaccgttttaatggaatcgtggaattttcacatctgactaagcaagacttaagtcaaattgtcgatttgatgttggcggatgtacaaaaaacgttagccaaaaaatccatcaaacttgaggtaactaaagcggccaaagattggctgatggaacaaggctatgatgaagcgatgggtgcgcggccattacggcgagtaattgaacaacaaattcgtgacaaggtaacggatttctaccttgaccacttagatgtcaaaaacttgaaggctgatttagtggatgctgagattgtgatatcggcagcttagcttaaatcagtgttcataaataactttatgtaagaggagattgcttgatagatctcctcttttcgttggttttcaccatttgatattaatctattgagtaatgtgaattagtgaaattaagtctagtttgacttgtaatctaaggaaaaattaagggggagtatcgatgaaactgatttatattaacgatctttttacatgaaactttagtttcgtatgaataattaaactgatgtatctttaaatgtttatttctagtcttaaaacaatattgaataattaatatatttatgtattcttttcaattaattaatactgttttaaactgttgatacaggtatgtatttgagcattataggagtgggatatggaaaagccagaacaaaaactattgctttataaattaagcgatcggttattcgctgcgattcaaaagaatcttcaactagaaagacggcaggcattactagttaaactaggcattgatactgtattaaatgttattcctaagctgataattactattatcttagcgttgctgctacacgagttggtcccagtgttagtttttatgggtagttttttagttttgcgtggctttgcctatggacgtcacttgaaatcggatttgttatgtacgatattaactatctttgtgtttgtgggtgtgccgtatgtgattggaactggtatttctgaagtatacagattgttattaagtttaatatttgtaataatcataagtatttttgctccagctgatacggtaaagaatcctattacatcgaagtcattgagaaaaaaattaaagcgacgggcaattggattgtcattaattttgagtttgttacaaatagttagtaataattattttggcacaatcattttaattgcgatggcattagccgctttattactaatgccctatgaaaggagggaaaattatgaaagaaaaaatgtataaagtacttagccatctttttcaatacgtaggtactaaacagttggttatgtgctgccatgggatattattcgaaactaaaattcctgatgaattaaaaagcaaggattagtgtagatatatgttaatgattgtcttccaagaattatctatctatttgataattaaatctttgttgagaaatatattttttgtgagactttttgatgttatattcttatccgtctgtatgctgatgagttatatttttttagcaaagttaggaattagtttttcttttttaatgttaatgatgtttatatttttcacttggtggtatgtacgagttctaagcggtgcactatgtataacatttcaagtgttcatatggtcgattatggttgaccatatttgtgatatattaactcgtttaatgaaagttcctaatgggtatgtggtagtgtttgtcatattgagtgtcgtaagcttaatttttcttaatattgtaatggatcgcacgaatttcagtcccacgtttagtaatcagagcttaaatcgcataaccgcactattattaatgataatatacttgtatattatgttgagtgaaggtctggaaaatcagttccaggttatattaagtaatttaattatattgtcagttgtaatggggttagtattggtgatttataacgaatatttaaaaaatgtaagagccaaatatgaagtccaaaagcaaagaatacaaatacaaaatgatactcgctatatgaatgaaatcgaagctcactataatgagttgcgacgtttcagacatgactatcagaatatgttgatttcgatagatgaatatttgaaaactgatgatttagaaggtttacaagaatattatcaaaagaatcttgcaccggtttcaaatcgggtgttaaaagaaaaatataatcttgaagatttgagtcgggtcaaagtgaagtcgattaagagtatcctatttagtaagttgagctatgcacaatcgcaagagattgaagttcattttgatttaaaggaaccattaattgacattactattaatgaattggatttagacattgcattagggattatgttggataatgcaatcgaagcatcggtaggacatgctgatggagagattatgagtgccatttttatcgaaaaaaatagtacggtgttcttgattcaaaacaatgtttttgaacagttaccacccttatggaagctgaaagaggcaggttattccactaagggcaagaatcgggggattggattgaatagtttaagtaagattgttaatcgcaatgagaacatgatactcgaaaccagagtcttaggagcggtattcttacaacgcttgacggtgaagcgagtatctcagaatgattagtgtctacatttgcgaagatgatccgaaacaattacaacaaatacggcaaatcattactaaggtaatcgtcgatcaacagctagacatgagtatctgtttagcatgccaagatccccacgaattgttagacaaggttaatgcacagcagcctcaaaaggcaatctatgtgttagatattgcccttaattcagatattaatggtattcaactagctagccagattcgtgacatgggccgtcgcagcaagattatttttatcacgacacacacggagttatctttgatggtgtttcaatatcaagttgaggcattagattttattcttaaggattttccagattccttgtatgagcgatttagcaaagttttacacgtggcgcaagatcgttttcaaaccgatgaaaatgaccaagacgactatgttcaaataaaaattggtgagacggtcagatcaattaatgttaaaagcattatattttttgaaagttcaaccagtccccataaaatcgtagtccatttggatgatggtgaattagaatactatggactgttaaaggacgttcctgatttgagtcctaatttctataggtgtcataagtcatatgttgttaacttgaaacgcattaagtcattggacaagcacttgcgacgattaaccatgacaaatggtgaaaaagtgctttgttctgcacaagctaatcgttatctagctaaatggcttgctaaaaagtcataatagttccaaggaagtcgcctgctaaattagtaggcgactttttatgtgctacgcgatgaaaattcagcgttattcgattagaaattgcagtgatatttgttagcattacgtgtactgggttcgttctttcctaaaccgtttaaaagtgtacttaaaacgattatcctcagattattcgtcttaaaacggtcggtatgtcccttgttcagagcctataataaagatgtgttcacggggtattggattggtcatgacagtaacgaatgcgtttagtttaaaggatgttgtgacaggcagaagttaatgtcgatcaatacgctgtgatgaattttaacgagagaggggcagattaggaatgattaggttatatacacaatcaagctgtcattcttctagagttgcacggcaatggttggaagcacatgggattgagttcaaggagaaaaattttagtgttgattcgcccacggtgcaagatctaaaacgtattttgagtttaaccgaacatggtgtagacgatattatctcagctcgatctaaagactatcctgaaattgcgcctaagttacccgaaatgccattgaatgaggcacttaaattgttgtgtgatcatccgaagttgttacgtcggcctatcatcattagtgatagtaaaattcaagttggctttaatgaagatgatattcgccaatttattccacgaccagttcggcgactaaagttcaatgcattgttgagtcgtctagatggtaatacaggggatcacattattaataaaaggatggtcgagtagtaagctatatctaagattttttgttaattaaagagcgacaagctagacttacacgatatgagtctaacctgtcgctctttagttaataaccatgagacggcatcatcattctttataacaaaaataatatcgcgctggataacatccggtcaaaatattaatcactgataatatcagcaatattcattcccagagcattagccacgcgtgtaccgtagtttttgtcggcctcataaaattgcttgatttcgagttttttgacaccaggcaaagtaacttggcctaacgcatctttgatagtattaattaagcgttcttgctcgggttctgacattaagcgatataggtcgcctgcttgagttgtgtaatcaacttgatagcgataaggctgtgcgcgtgtttcaccacgaacagaatcaggtgaaagtgcggcatccggcacctcttctggcccatgcagtgcattaggctcgtagttgacctcagcaccttgattattaattttcatgtaaccatcacgttcataattatgaactggaacaaccggcttgttcacgggtaaatcttcaaagttggcacctaaccgatatcgctgtgcatctttataggagaataggcgaccttgtagtaatttgtcgggagatggttcgataccaggaacaaaatttgctggcgacatggccgcctcttcaatatcggtaaagttattagtgggattctcatttaaagttagtttgccgactttaattagtggatagtctttgtgggagatgactttagtgacatcaaaaatgtcccatttatagtttagaccttcctcatatggcaagatttggacatacatcgtccatgatgggtaatttttttcttgaattgcatcatataagtcatcttgtaagtaatctaaatcttggctcattgctttttcagctgcttgagcagtcatatttttaacgccttggtctgagatgaagtgatacttaacccaaaactgttcgccattctgattaacccatttaaaagtatgggaaccgtaaccattcatggttcgataggacacaggaagacctcggtcgcccattaaataagtgacctggtgcaatgattctggagaatgagcccaaaaatcccattgcatattttgcgtacgacggttcgttttaggatcccgtttttgtgaatggatgaagtcaggaaattttaaagggtcgtttacaaaaaagaccggtgtgttgtttccaacgagatcataattgccttgctgagtataaaattttaaggcaaaaccgcgcacgtctcgaacggtgtcaggataacctttttcaccggcaacttgtgagaaccttaagattacgggagttttcttaccgacaccattaaataagtctgccttagtatattcccccatgtcgttttcaagttcaaaaaaaccttttgctccggcccccttagcatgaacgacccgttctggaattcgttcacgatcaaaatgggctagtttttccaaaagattatagtcttgcattaatacgggaccacgagctcctgccgtttgggaatgttcattgttagcccatggttggccggtttccgtcgttaatttttccgtcattttaatcgcccttttcacgtaaattacaagaaagctcttgcacaatttaaacgctaacaccttaacagagtgacttcaatcattatgcacagttaagttaatcgttcatgtggcgtagtttaattttaatcagctatcaagctgtttgatattttctaggccacccggaatcgtcacatgagaaatagtagcgacccatttattaaataatgtgttatatttgtctatcattatcgataattgtaaaatgataattataagaagtaatcatttatgaatcggcttaaatattcgtgtaattctattattgtatttaagcggtttaataagtctaggagggattttatgcattggttatgggttttgatcattggtgctattattggtgcaattgcaggtgctattactaataaaggtaaatcgatggggtggattagtaatattattgccggattggttggatctgcaattggggaagctcttttgggatcatggggaccacaattagccggaatggcaattgttccttcaattattggtggtgtgattgttgttgcgataacctcatttgttctgacacggatggattagtaaggagatgattgcgatgattaaaagcattttaaagttttgtttagctgcaaccttaatcgtaagtggtgttcttattggtgggaccgtacttactgctaagggaattgataacttgggtgataaattacaagataagttacatggataaaaattaattttacaatgagccactgatgggtgtactagttgacctgttagtggcttttagtatgagtaatatcattgagttcaaggaactaaatcaagagcgacgattttaaactaccttcaatcgaataaaagtaatatttacttttattaagaatgagggtatgattaaaatcaaaaaaagaggattggcctatgtctaaacttattgcgaaaaatgtttttcagttgccaaaaatgaatttattagtgctgactacatcggctttcttattggccttagacgttattttatacaaaattgctatcggaccagcgtattttcaattatcttttggctttttgtctatggcttgtattggttatctatatggtcccatttggggtggtctcttggagatgatctccgatatattaagctttactatttttggttccggcgcgtttcagattgcctttttgttaactgcatttttagggggatttattgacggtttgtttttatatcgtaaatcagtcaattggttatccgttgtgatgacgcaaatacttgtaatgatttttgttagtttgatgatggactcatggctaatttcagtgctatttggcactaattttaaagtgttattgttgggaagattggcacgcgtcatcattcagataccattacaggtgattgctattttttacttcattaaggcgttagaaaaacgacacgtttttgatagaatgaggcttagataatatcgatggatgctacaaaaagaggttgaacacggtatgaaacgcgctacaatcgttaaacaaataagtctaacttttctattgcacttcaagtctagttcaaccttttttaatattaactagccttattatgactgcggaaaaacaatttgggtatcgatggttgagttggtacccagcaaaataaaagagcggctatgtggtgggcatgataattcccttagcagctaaattgcggacacattctgctaagtagctggcgttgtgttctggatagattggtgttgttaatgcaataggagtgaggtgatcataaggcgggcaaaactgcccacgataatttggatcataccatattttattaggatgatagccgcgaagttgcatttcatccatcactaatacatgaaattgatacaacttgtaaggggaatatttgaaaacataattaacggttgcatgatttttaccccaaccattgcctctcaatgcggcaagctcacggtgttgacctagtaattgttgtcgtggtaattgatggattaattgttcatgccatagacgcataggccacactcccttatcgaattttaaaattaacaggtgaatattaaaaggaccaactcatcattatgatgccgaatatactgatacttttgaacgggtgatgattgtaaacgacggatagttaaagtgaatattcgcaattattatagcatagcgaattgatcaatagtttagtacaagatcaaaaaaacggccatagcaacaactgatatgatcaaacattccttagaatgcttaccttgaaagttgggttgagtaattaaaaataatattattttatgttgtgttagcagcagttcttaattttgatcacagcggtgtttgatagatgtttgacggtatgcaaataaaattattgttctgataaaaggaatcaatgattaataatcttgagcgtcatttttcgaatcatggcgtttttatattacaatggtcctagaaaaagtaaagttatggaggcgattaaatgagtgatttggatcagacaaacaactatcgatacgtcattgttggtggcggaatggttgctggctatgccatcaagggaattcgacaggaagatccagagggcgcaatcttagttatttcgcaagaggcggatgttccgtatgaacggccggcactgagtaaaaagctatggctagatgatgagtttactgaagagaacattcggattggtgctgaagattatcctaatgtgacttttaagttcaagacaacggttacggctattaatcggcaagataaggtcattacattgactgatagtgagcaaatcaagtatgaacagctattgctggcaactggcggagaacctcgacaaatccagggacctgctgatccacatgtgctagtctttagacagtggtcagattatcgcaagttacgtaaatttagtggtccgaacaagcgagttgtgatcattggtggtggatatgttggtacagagctcgcatcgtcactgactcaaaatgggactaaagttacgatgatttttccagaaaaagcgctgggcgagggtaaatttcctgagtccattcgggctgagtatgaagcaacgttcaaacgtaatggtgtcacactgatgagtggtcagtttgtccaatcatatcaacgccaaggtgatcatttgactctattgacaaaggatggtacggtgatcgcagccgatacgattattgttgggttaggtgtcacgccgcggattagtttggctgaagatagtagtttggatttagctgatggtggtgtgaaagttgatgagtatctcaatactagtgacccagccatctggtctgctggagatattgcctcttatccagatcacatcttgggtcggcaacggattgagcacgtggaccacgcccgactttctggtgaattagttggccgtaatatggcaggtgctcacatgagctatcaacataccccatacttctattccatgatttttgatatttcctggcaagcaatcggtaatattgatcctaaattgcaattgatttttgatcggcgaacgcatggatcgcttgtttatttcatagatgccggtaagttagttggtgttttagtttggaatgttaaggtgaaccttgatgatgttcgcgcattgcttgcgaacgctccagccacggatgatttggtaggttccattcgagagcaagagagatagtatctggatgagacatttgcgctattgtgaatgtacgtcaggacaaatcgaccatcattaacgatggttcagtaacaaatgaaaagtcagccgtaagttattttgcttacgactggcttttatttttaatgtctaaaattataaggcgctaatgaagcgttgtgcgatttcgagtggccgggtgatggcgcccccgacaacgaccgcgtggcaccctaagtcaaggcaacgtttcatcttctcgggcgtatccaccttaccttcagcgataacagggcgtgatgtggcttggaggacttcctttaagtaggcgaagtcattatcagcaatgttggcaccagtcgtggctggtgtgtagccgtgcatcgtggtcccaataatatcaaaccctaacctatccgctactttgacgttctcgatggtatcagtatcagccatcaagagggtatcagggaattctgttcgcatggtggccacaatctccgccaatttttcaccgttaggacgcggctgacccgtgacatcgcaggcaactacggcacagcccgtagcagcaacggctcgcatctctttgattgttggcgtgatgtaaacaggtgagtcgggatagtcgactttgcttaaaccaatgagcggtagatcaacttcgtcttgaatggcctgaatatcaacaacggaattagcgcgaatacccgcggccccagcttccttagcggcaagggccattcgtgacataataaatgaactatgcagtggttcattaggtaacgcctgacacgagataattaatgatcccttaactgtatttaagaatgtatttttcataaaaaagaccgctttctactagtataaattagattagttcttgaagtatttttcgtaaattgccgtagctcctgcttccatttcaggggttggatggctcattggtttcttaacgtaaccggcatcaacacccatatgtttcatgaccaatttaagcgttggataaatgtcgttggcaattaaatcagtaatcatatcgttactgatgttttgcagttgacgtgctttgtcaatatcgccagcttcaaaagcgtccatttcctcacgaacacgtggtgcatttaagttatacgttgagccgatgcaaccgtcgacattcaatgcaagggcaggcaaaagcatctcgtcaaatccagataagatgagtttgtctggaaaggcattgcgtacccgttcaagtaagtaaaagtctgcgttggtgtacttgattccgatgatctttggattttcaaagagttccgcaaattgatcggttgttaaggcaacaccagttaaagcagggatggaatagattaataatttgttgtcaacatctttaaggatttcgttgtagtagtctttgatttgttcaaaagtaaagttgtaatagaaaggcgttacggctgataatttcggatagccaagatcagtcgcaaacttagcgagttccttagcttcttttagatttagtgagccaacttgggcaaccaagtcaatcgcaccgtttgcttcatcatagacggtctccatgacttgtttcttttcgtcagtattcagcatgaaggcttcaccagtactaccacaaacatacaagccatcaaccttattgacgtcaatgttgtagcgaacgagagcacggatgccatctaaattaatattaccgtctttgtcgaaggctgtcatttgtgctgcatataatagttttttactcataagtataaaactccttaaaatttattttttgatggatttgtaataatcatctcaaaattcaaccgcttacaggaaatactatagcttctaataaaaattattgcaacacgcttttttggtaattattatcattatataaagaaaacgcttacgcaatcgttgctttcctgatattaaatttcttttttagttgataaaaaaataattattgtggtattgttaggccgttcatcttaacgattcgaccaaataataatgcaaggatgataattatgacaacacaatatttagtatttgatatcgggggaacaaccattaagtacggtctcattgacgaagtattacatctaagtcatgaaggcaagtgcctgactgagcataatcatgatggcctgatcttaaagcaactacagcgtgtaaccagggactaccaagcagagtattcgttagctgggattggcgttagtacagcgggaattgtgggtgcagatggtgcgattcaatacgcagggccaacgatctcagattatcagggaacaccaattaaagccgctttaatggcgcaaactggtctaccggtatttgttgttaacgatgtcgatgcggctttgctaggcgaacaattagcaggtggtgccaagggcgcaacttctgcatattgtgtggcactgggtacggggattggcggtgcgtatgtcgaagatggtcggcttatgacgggtgcccatgcgacagccaattcgattggctatacattgtatgccccccttaccaagacaaattatgaacagcgagcatcaacattaacgcttgagtatcaattagcaaaatatcagatgagtgttaaggatgcgtttgaagaagctaagcgtggtacggtcccgtatgtcgccatcattaatgattgggcagcagaagttgcgacgggattagcatcaatcctattattgtttgatcccgacattctcttgattggtggtgcagtatcgttacagggacaatatttggtcgatttactgaccaatgcgttgaagccactattaccgccagatttaattaaaacaaaaattaccacggctgaattagccgataaagcccagttatatggggcgatggcagggctgttgatacgataattatttttatttaaaaagaaagcgtttacaattatcgtattatgtgataagttgataacgtaataatcattcgaacagttcaaccgctactaaaaaatagtgcaagcagtgcctactgagtgttaaagcccagttttctaagcatgtttgcaagattttaagtagcggttttttattttgaaattagtgaagggtggactaaatcatgaagatcggaattaacaccgcaatttatgagtcacaagttcaggcaggagccactcaactggagtgcttaaaaacattagtaactcgttttgatgttagtgcagttgaagttcgcggtgaattcttcaaacccgagacgcgatcggcggaactgttagcaatcagtcagctttgtgaggaacaacactgggatctctattattcggttccagaggaactgtttagcagtgatggctataacgcaagtctagtgacaaatctagaactggcaaccaaatatcatatcaaatcattgaagtatagctttggtgtgcaaccaacattgcaagcacatgacttggaagcgctaactcagctgttagcaactacccccatacaagttacgatcgagaaccaacctaatgcgaatggtgatttggcgacatttgagtcagatgttgcttgggttaagtcacaaaagttgtcattagggtacactttcgattccggaaactggtattggattgatcaacagcctgaaccagcctttgcagcattgaagtcagcaatcaccgtatttcatttgaaggatatcaaggatcaaacaacggtgatgttgggacaaggggcaacggattggcacagtctattaggtcagttgtcacccgaaatcccagtatttctggaatataatattgcagctgcagatttatcgggacagattgatttggttaaacaagcattaagttagcgaggttcaataatatgaactatcttttgcaattagttttaatcttattactgacaaagttaggtgcgcatattgcggctacctttaacttgccaagtgtgattggggaactattagtcggaattttagcgggacccgcagtctttcacatcttaacgtatagtacttttattcagtactttgccgaaatcggggtcattattttaatgtttattgctggtctagagggcgatttgaaattgctttttcgctactggaagccagctttaactgttgcgacattaggcgtcatctttccaacggcatcggccgtcctactttgtgtgggaatgtccgatttctcactgacgacttcaatttttctcgggcttattttgagtgcaacttctgtaagcattaccgttcaagtattgaaagaaatggattatttaaatacacgtgaaggtgcaattattctaggcgcagccgtagcggacgacattatctgtgtggtgctattgggaatcagtacaagcctgtttggcactgctagtgcgcacaaccaatcgcttgtggcaatggttttgccgaaagtactgttcttcgtcgttgtaatcgcacttgctaagtggtttgtcccactctttctgagaggattcaataaggttaatgcatctgagaatattacgacagcggcgatggtgctctgttttggtttttcgttcttagccgttaagttaggaatgagcgatgtcttgggtgcatatattgcggggttagcgatttcagaaacacgctttaaggcgcaacttgttgctaaggttgaaccaattgggtatgccgtctttattccagcattctttgtcagcattggtcttgaaattacctttaagggaatgcaaaacgatctagtttttatcggattgttactagtgcttgcgattttaggcaagcaaattggtggtgccattggcggtaaattgtttggattgacctggaatgaggccaatattgtgggcgccggaatggtttcaagaggtgagatggcactggttgtcgcgaatgtcgctgtctcggcgggcttaatcgatcataatcactatacggcaatgattgtggtgactgttatggcgacacttattgcgccatcaatgcttaaaacatttattcaacatggtaaacgagctgtatcacatattagtttaaataaaacaagcgaggcgaaatcatgagtaaagttggatttggagttctgaattgggttgtcttaggagcatacttattggcaatgctaggtgtcggagcttattttaccagaaaagctagtaaaaacacggattcatttttcaaagcagaagggcatattcctgcttgggcggcggggttcagtatttacgcaactactttaagcgcaattacctttatgtcaactccagaacaagcatttttgagtgactgggcatacgctatcggaagtttttcgattctaattattattccaattttagttaaattctacattccatttttccgcaaattgaaagtaacgacagcttatgaatacttggaagaacggtttagcccagtcatgcgggccattagtagtttgctgttcgtactttatcatatcagccgggtggccattgtcatctatttaccgattattgctattacatcggtttcaaacatcaatccaattctaattgcctgtgttgtcggtggcctttgcattctctatacattcttaggggggattgaaggagttatttggagcgatgttattcaaggattcttgcttctaggtagtgctctgttaatttgtgttttaggaatcttttatatcaagggtggtttcggtacggtggttaacgatgtcgttaccaatcataagtttatctctggtaacgactttaatattggcaatctatctaagtttgtgccgttgatcttagctggtcaaatctttaatagtttgtatcaatatactggtagtcaagatgttgtacaacgttatcagacgacagctacgattaaagatactaataaatctatgtacactaatggctggttagcattgattaccattccattattttttggaatgggtacgattctttacagtttctatcaacacacagctgccttgccagcaggattcaatacgagtgcggtggtaccatattttgtcattacccaaatgccagctggggttgcaggattagtgattgctggaatctttgcggccgcgcaatcaacgattgcttctagtctcaacgcgatctcctcgtgtgtaattacagactttaaacaacgtttctttaacgataagttcaaaaatagtaatgatgttaccttggctcggggaatcattatcattgcaggcgtgttaggattagccgttgcgatttatctgttgatgggtaacgcttcacagatttggaacttattcttgtcggtcactggtatctttggtgtgccaattgccggaatcttcgctgttgggatctttacgaagcgtgctaatacggttggggtgttaaccggactagtgttaagtgtcggcttgtccttctgggtacaatcattaaacatctcttcattattggttgcttgcgttgccttcatttcagcttttgtcttgagctacgttgttagcctactcttcccaggtggtaatcatgatgtgactggattgactgtttcaacaattaatgaaacatacgtgaagaagaattaaaatgtccgacgatcttgtattaatatcgcttggttattagtctaacccatgatgtttaggacaagacgtagacgtaaatctgaaatctcgattgtcttcacatgaggatagtcgagattttgtgctcaatctgtttcaaggcaagttattgacacagattttaaggaggttatggaaatggagatacgcacactagctttaaaaacgcccgaaggacagccatttacgatgtggatctatcaacatgatcaattcacgctatttccggatgatcgacagtggccattagcgttgatttttcctggcggtggctttgcgggctactctgagcgggaagttgaagctgtagcacttaaatttattgcaaagggttaccaggcggccgtagtgaagtataatcttacgtcggatggcccgttttatccaacagctgccacgattggattagcggcattaagctacgttaaacggcatgcgcaggagttgaatgctgattctgatcacgttgttgtcagtggcttttcggcgggtggacatttggtagccgtgatgacagcgcttggcgctcaatcagaattcttaaataatcatggctttgaagagacaaagctagtaccatttgcgcaaattttaagctatccggtgattgatctgacaatgggttttccaactagtcatcatgagatgatggctgtgactacggatgaatcttactggcatgcgcaagagttagtcacgagtcaaacaccgccgactttcatttgggcaacgcggactgatgagcttgttccagttgtgaatagtctggtctatttagcagcgctaggtgagcataatgttccatttgagagccatatctatgcagccggtgtccacggattggcatttggtgatttagctgattctcgctatcatcaccctgaagatgtggtcccacgggttcaaaactggtttccaatggcattgggctggttacgtacattatatgctagcaagaatagtactgaaatttaggggggtgtgaaaatgaaatatgagcaattgagattaatgacgccgcaacattttgaatttaaattaacctgctattggaaagaccaacttaaaatggattatgatcctcggagatggccaatccttctaatttttccgggcagtggatttattcaaatgacagagcgtgaagcagaaccgattgctttggcttttagtgcacagggctatcagacaatggtagtggaatacaatctattggatcgcgggccagtttatcccaacgcaattgatgtcggtttgactgccttaaagtatgctaaaactcaaggaccaccacattatggtgatgcgaataagacgattttgatgggcttctcggcgggcagtcacgtcgcagcattaactaacgcgatggggaataacaccgagtacctcaaaactcacggctttggtgatagcccattgacgtcacgcttgcaggtcttaggttacccggttatcgacttggcggcaggttttccgaaaagtcgagaagaggcctttaaaattagtccagatgaacaatattgggctagtcagaacctagttactgatcagacaccgccaacgtttttatggaatacttgtgcggatgcggtagtgccaacaatgaatagtttattgtacgcagaagcactagctaggcatcatgtcgagtatgatattcatacatttacacatggaaaacacggtctgtgcttgagtacagttgaaactagtcgatataattacccagaagatattgagccacgtgcggcgaactgggttccgttagtgctaagttggttgagtgaaatgttagatttgacgcaagtggactttaaataggagtgacgaatgcaagataatgaggaagtattgggtactcgtttgcaaaatggaatgtttggtgtaccggatctacatccagatgaacaacaccgttatttagggaccttttacgaacgagttgaacttcaaatttcatttaagcaggctctgaggtatgactttacgtcagtactagtgccggtattgcggcaaccaagagactatcagcttttgttgaacggtcaattagatatggatatcatggggcgctatatgcggctagcgaatcagtatagcattttgtttactgtcaaaaatagtcacttttatcatcacaatctagatagtgcagcgattatcctgtgcgctgaccatgcacttaatcgaactgaagttgacatattgcagcgatacccacaaattgctcagagataaatcggaaaaactaccatcaagattagctgaaatcttgatggtagttttttagcgtttaccgaatttattatctgtaattaaatcgatcgtatgattcattcgatcacgatacttcgcattctctaatagcatggcggcgataatatcaagagcgtaggttatggcaaattgcgagttaacaaagcgcgagttgttgacgaatttgctgttttttacgagaatcgtaagatcacttagttctgctaagcgactgcgttcatcagacgtaatggcaataactttggcttgcttctttttggctaacgcaactgagtcgttgacttctgctgtagcaccagtaagagaaatggccaagataatatcaccaggttgcatgatgccaccgctgatgtacatgatatgggtgtcggtcatcgagaaagcggcaatccccattcgaattaagcgctgggtcatctcttgtgcggtatagcccgagctacccagaccgtacagatagactcggcgagccttggagattaaattaacggcggcatggagatcgtcgggggataatcgttcccacgttccactcagtattttcttgtagtaactatagacctggtccgcaacggtatcttttttgtcagtggttgttgcagggacaactggcccttcggctaattgaattttgaaggcgtaaaagttttcacagcccatttttttgacaaaacgggtaatggtcgcattactaacgtgaacgttcttagccagactagaaatcgtcattttttggacttctttcggctcttgaatgacctttaaggcgactttgcgttcttgtcgtgagagtgtcggatacgactcctcgacagtagttacaatactcatagatttggctcccatcatggtttccttatgttaacgctacaatagcatagtttttgccaaatagaaatagatcagaaatgaaagaagctataccaacacaactgttggtatagcttctttcatttcttatgaatacgatttagacatggttatcgttctacttcaatgcagtccatttccagttttcaacttctggaagatcagtaccttcagcacggatatagtcatgatgcttgtttaagatgctgttcatctcttggatgacatgggcacctttttcggcataggctggcgttgctaataaggcagctttaactaagtggaaacgatcgagttcgttgcgaacacgcatgtcgaatggcgtggtaatgtcgccttcttcgcggtagccatgaacgtgtaagttatggttatgacggtcgaagaagatggtctttactaagtcatcgtaagcatggtatgcaaagataactggcttgtctttagtgaagaaggcatcaaattcagcatctgataagccccgtgggtcgtccttcttcaacttcagaagatcgacaacgttaatgaagcgaatcttcatttcagggaagcgagcgtgcaagattgatacggccgctaaactttcagtcgttggttcagagccggcagttgcgaagacaacgtcgggttcttcaccattatcagtacttgcccaatcaaccacacctaagccatcacgaactaaatgcttagcttcgtccatcgtaaaccattgtggacggggatgcttgctggcgatgatcaagttaatcaattgtttactttggatcgccttatcaaaagttgcaatcaaggtgttagcgtcacctgggagataggcccgaacatattcggtcttcttttcagccaagtgtgagatgatacctggatcttggtgagagtaaccattgtgatcttgctggaaggcagttgatgatgcaatcacgtttaatgaagggacatcaacccgccaaggtgtttcttcgtgagaattccgtaaccacttgaaatgttgggttaacattgaatccacaacgcgtaggaatgattcataacttgcaaagaagccgtaacgaccagttaagttgtaagcttccaacatgccttcatccatatgttctgacaacatggagtcaataatccggccttgaggtgctaacaaagcatcgttaggttcgtggattggttccatccattgacgcttggtatcttcaaacgcagctcctaatttgttagataaagtttcatcaggaccccaaccgcggaagttcttgttatctttgtttaattcgattaaatcacggatatacttaccaagttcagtcatgtctgaaccgtcttccttaccgtgatccttgttgtccaaagcataatcatcgatatttggtgtaattaagtctttagttaacttgccgccgttagtgacgggattagcagccatacgagcttggccttcagggatgattgcggcaatttctggttttaaagtaccattttcatcaaataattcttctggtttgtatgatttgagccagtcaactaatttgtcggcgtgttccatgtgattgcgatcgacaggaattggaatttggtgagcccggaatgaaccttcaattggttcgccgtcccaactcttaggaccggtccagcccttaggtgcccggaaaacaatcattggccacttaggacgagattcatcattgttatccttggcgttcttacgaattgcgtggatttcttcaatgactttatccaattcttcagccatgattttgtgcatcttggcagggtctgtaccttcaacaaagtgtggatcccagcctagacctttaaagtagtcttcaagttcttcatgtgattcacgtgaaagaactgttgggttagaaatcttgaagccgtttaagttcaagattggtaagactgtcccgtctgtaattgggttgaggaacttgttaacttgccaagaagttgccaatgggccagtttcagattcaccatcaccaacaacagtagcagcaattaaaccagggttatctaagaccgcaccagcaccatgcaagattgagtagccaagttcgccaccttcgtggattgagcctggtgtcttagggtcggcgtgggaggcaacaccacctgggaatgagaattgcttgaataagcgcttcattccggccttgtcttgggtgattttaggatacgtttccgtataagtaccatctaagtaggagttagaaaccattacttggccaccatgaccaggaccttcgatgtagaacatgttgagcccatacttgttaatagcacggttcaaatgggcataaataaagttttggccggcaattgtgccccaatgaccgattggatggacttttacatcggtcgcctttaatggttcccgaagtaacggattatttaatagatagagttgaccaactgagatgtagttagcagcgcgccaataggcatcgacgcgttttagatagtcatcagaagaataatcaactgttttggatttaattgcttcactcattattttgcaactcctttgcaaacttttgttttatttatcattacggttattatgataacggtttcaatcataaagtcaaggtgaaattggcaaaataatttaagaacctggcatttaaaagtaagaaagacggttaggggcatggttttcccccaatcgtctttttttatttgccactaattaatgagatgtcggctaagcgaatttgtttggcaatctgagtgtccaattgttcatcggtgatgataacatccacatcattaacgtcggctgtcttgtaaagtgcatttttttcgaatttagtgtgatcagctaagataactttcattcgacaatgagacatcatctttttggaaacttccacttcttctatatagtggttggtgattcctgcttgaaggttgacgccgccacagccaaagaaaccaatgtcggcatagatattattgatattggcaagtgtgattggcccggacaaagaaccttcactagtccgcattgttccgcccaagagtacaatttgaatatttttaacaaactgtagcgagttgagaacgaaagtagagttagtgataacggttagattggttagatggctatgtttaatttcttcggcgatttgaaaagcagttgtaccgtaatcaagaaaaattgactccccatcatgaattaagcgtagtgcattggtggcaatttcatttttttcagcaactgcttcgtgtctacgcttaccatactttgtctcgttgacactttgcggggtagtagcaccaccgcgaattgcctgcactagtccttgtttatcaaggttgtaaatatctttacggatagtctcacgagaaacattaatttccttgctaatttcagcgattctaatggtaccacgttggtttaattgatctaaaatatacttttgacgctgcataacttccatatgaggtggcctccttgtaaaaataaaatttatttttcggtagtaatcatagcacatatttggcaattgtttgcaatctaattttgtaaagtgattgaaatctctatctaaatcctttatatgtaagcgcttaatagagtgctatgtcgaactttgtgagataattaacttgcttttgcgaacgcttatgtcgttgcaaagcactctttgcaaacgggtgttaaaaacttttttaaagaaaagtattgcaaaagatttgcaaaatgatacaatttaaactgttgaaagcgattacatttatataaatacgaagggagcgtcttattttgagtgagaaccttgttgaagtaagtgattatttgagagaccaacttatttttctacacacctcttttaaaacgtcgaaggaattatttacagcgattaacgcgaaggcacaggaaaatgggtttgtaactgatcaatttttaccgaaaataatcaagcgagaatcaacttttccaactggcttgcaactggaacatcgaggtgttgcaattccacatactgacgcggatacaatcaacaaagaatttgttgccgtggttgttaatgatgctccaattgcttttagtcggatggatgatccagagcaaaaggttgatgcaaaattagtttttgtgcttggtctgaataaaccacatgctcagttagagatgctgcaagcattaatgggaattattcaagatgattcattagtaaattcattggaaaatgccgagaactttaaccaaattcatcagttgttaagcaaataaaagataaatagaagaaatacgaggagagattattatgaaaaaattaaatgtattagtagcttgcggtgccggaattgccacttcaacggttgttatgaaaaaagttgaagatttgtttgccgaaaataatattgacgctaatttgattcaaattaagattgctgaagctgcttctaagcaggatgacgcggatatgttgatttcaacaactgtactaccaactgaatataagattccagcgattaaagcaatgggctttttaactggtcttggtgttgataaattgcaggatgaaatcttgactaaagcacgcgaaattcaagcacaataattaagagctagggttttaagcaggaggatgcattatgaaagtattatctgatgttgtacaaagcatcattaatgtcggccccagcgttatgcttcccattattatctttattgttgggttaatctttagggttaaaccgggtaaggcactcacatctgggattactgttggtatcggtatgattgggattaacctagtcatcaatttgttgacaactagtgttggtcctgctgcgcaggcgatggttaaacggtttgggtttcatttaacgattattgatgctggatggcctgccgtttctgctgggacatgggcacagccgatctcagctatcatgattccaattattttagtcgttaacgttggcttaattttgttaaatcttactaaaacacttgatatcgatatttggaattactggcatatgattgcggccgcggctacggcttatgtggtgacgaaaaactggtggtttgcaattctttgcgggattatctatgaaatcgctgtcttaattattgctgataaaactgcgccaaaagtcgctgagttttatggcttggatggcattagctttccaactggttctgctgcggcttatggcctaattggtattccaattggatgggttgtcagcaaaattcctggaatcagaaaatgggatgtggatccacaaacaattcaaaaacggtttggggtctttggtgaacccatggtcatggggattgtcattgggatgttactagctgccttaggtggttacagcgtaccgaacattttgaagcttggaatgtccatgggtggtgtgatgttcttaatgccgcgtatggttaagatcttaatggaagggttaattccaattcaagaaggtgctcaaaagttacttcaagagaagtacgggaaccggaagatttacttaggaatggatgctgctctttcaaccgggtcaccagctactttggcaactggactattaatggtaccaattacgttattcttagccattattttacctggtaaccgggtattgccattcggtgatttagcaacaattccgttctttgctgccttgattgttcctagtcgtaaaggaaatatcgtccactctgtactctctgctactatcgtaatggtatttgcattgttgatggcaactgactttgggccaacgttgacatcaatgatgcacggtattgttgcctttccaaagggcgcatcagaggtcactaacttggatacgggtggtaacatcttgaactggttaattttgaaactatcacagttagtacaaccattacttaattaaaggattatccgtagaaaggaaaatggattatggatactgtaaaaacaactaaaactgacgaattaaagggcgctaaaactatggaggctgtcgttaagacggaatctggttacgacaatatggaactgaagcaaattccaatccctgaagtaacaggagacaaagttttattaaaagtggcctacactgggatctgcggtactgatattcatacatttaagggtcagtatgccaatgcggtgacaccacttgttttgggccatgagttttcaggtgaagttgttgaagtgggaccagatgttaaaacgctaaagcctggcgatcgggtgactagtgaaacgacttttgcaacggatggcacatgtgtttactgccaagataaagaatataatttatgtcctaaccgtgtaggaatcggaactaaagctaatggttcaatggcaaattatgttctaactcgtgaggaaagtgctcacattttaccagataacgtttcctacaagatggctgcaatgtcggaacctttagcatcttgtgttcatgctatgtatcaaaagacaccattcacgttacatgacactttattaattatgggaccaggaccaatggggctactctcattgcagattgccaaagaaattggtgcctttgttattgtttctgggatcactaaggatgctgatcgtttacaaattgctaaagagttaggtgctgacattattgtagatacccaaaaagaagacttggccaaggtcgtgatggatgcgacagatggcgttggtgttaccaaggtttatgactgttcaggtgcaacaccagcggttaactctgcattaccattgatccgtaagggtggaactttccaacaggttggtctttttgcaaagccgatgaatgaattagatgaacgttcaattattcagcatgaaattacgtatcgtggctcacggtcacaaaacccgtatgattgggcgattgctttacatcttgaaagcaagggtgctattaaccaagatgcaatgattacgaaggtctttgatcttgaacactggcgtgacgcttttgatgcaatgatggccggtaaagagctcaaagttatgattgcctctaatcctgatgatccagatttagcagactaaactaattgtagttgaatgacagaatattaaaattataacctccttaatttagagcgctgagatatttgtcttggtgctcttttttgggagcaggggggttctttatgaagtatcaaaatatcttgttcgatattgataataccttgattaattcagcagacttaattgctaagttattgaaggagggggcagttcgcgagggtgttgatatgccaattgaagaatatcgtaagagaattggccagcccggtgagatgatcctgagagaatttggtgttcaaaattggcagaatgtattagccagatatctaattgaatttaacgagaatatgaatgaaataacgtattttgtgggagttgaacaaatgttagatgatttattggcaatgaatctcacagtgggagtggttacatctaaggatcgtgttcaatttgataaagaagtcagtcattttccgattatcgcaaagatgccaattgtgactactgctgatttaactaaaaatccaaagccaagtggagagccgattacctacacattagagagatttaacttagcacgtgaaaggacgttgtatgttggtgatagtatctttgatatgcaggcttcaaagaatgcaggcgttgattttgtagttgctaaatggggagcattaccgaatgtcgattttaataatgcgaaatatcaagctaagaccccgaatgatatcgttggaatagttcagtaagtaaatgagattagactggaaagagcgcattatttaataataaaaaatcctttttaactctaaaagcagaggccaagatagcaactttcgtttcttggcttctgcttttagatacattaataaatgaaatgaagacgagctagttatctttatacaaatatctgaataagtcccttttattattcaaatgatacagattagttaaccaatccttttgttgtaattgtgtcatcaagtcactgatgaatgatagatgcttctcgtaatctatgggggctagaccaataattacatggaccattttttgatttgtcataacaggtagcggcttatcaagtaaaaagaaagtagcaccgagattattaacgccatcacgtggagcagcgtgcgccaacataacgcctgacccaataaccatgtatggtccgttactttcagttaaatgaatgatctgatcgatataatttttttcaacactatagtcttcaagtaggggggacagtgctgtacgcaccgcctgcttccaagatttttgatgatttagaaaaccaacatgttctggcggcagtagtttgattaattctgataaattttcttggggtgcggctaatagtggttcctgagttagctgggtcaaatagtcgttgagtgcgagtttcagacccataggatttcttatcatagcgtagttgcctacaatatccaatagtgtatccacattaaataacttgagtgtgtcagaagttgccaacccagccttaataatagcattatcgatgatcttccactccaactcggaaggaaaagcagatacggtagttattggtatgttgcgctgggtgtttaatttgattgtactgatgacaagctgaacattacttagatctgaattttcgtattgaagcacattcattggactagaaaaatgaataccgcggtaacggctttctagttgttgaagtaatagacgactggtaccgatgccactagaacaaacgacaagtacttcattttgtgttggggtgcttgttttttgctcacgaatagcaccaccaaagtaaatggcaattaatgcgatttcatcatcagaaagtgtgtgatgaatatattgttcaaatggtacgacaactttacgagtgatttcaaaagtgtggtgataatgctgttgaatactttttaagtcggggtattcaaatggcatattatattgagcacgatagtaggttgaaagcaagtgaaccgttaaactgtcactaatcgacttgattgaaacatgtgcgccggagaggtggttaaaactagaaatcattcgaactgagaatggttttaacttttgaatcaagtcgtcattccaattgacatgagcaaattgactagaattgatcaacttgactaagtagtcaacctcattagagttatcgatatgataatcgttcaaaaaacttttagcccaaatgtgatccagtgttaagtcagtttgtgcggatataacatcacttagttggttattacagtctctaatgttagttaagtaccaatataaaaatagtcgaattgtgatacttgcatcgtcggttaaatattttccagttattctttcaaagagtttaatctggtcgtttatggtagtgggcttaatggtagcccgcctagtttgttcaatgagtgtcttcagttgagtagcatgatcgtacacccatttgcgaactgctgtcggggaacccgtgattattttaccggattctgtattggtgatttgtaaatgatatagcgctagttgtgagtgtagtactttgatatctctaataactgtgttcttagaaatattaaattggtaagttaggtccgctaacgagcaaccactagtgttgaggatactaaatgcaattagtagttggcgttgcttagcattgttggtcatgatcttgctagaagtttctttttctgtcattttatgcagaaatttgatcgtgtcagtcggaaggtaatatcctagttttttaacattagtaatcggaaattctgcatgctgatcaagctcatcgtttactttatttattagatagaataggctacgacgtgagatatgtagatgttgttgtaagaagttagctgtggtgtagcccgatgacgttaatagaatttctaataattcattaccatgttttcgtttgctgaaatttacacgcaattcagtatcctccctgtattaagtctactaaaaaattaaagcattaaggtaccaaagtgccaaagttgcactattctcaaaaacattgttgcacttgtggcgctattattcaagtttatactggtcattgtcagataaatagcgatatcaagaaaggaggatgaataaaaatgctgttggatttattgaataaacagactgtgcaagtatcagaaggcacagggctagattggaagcaagcaattgaattagctgcggaaccattgattaataataagacgattgaagatggatacatcaaggaaatgctcaatgtggtggaatcagaaggcccgtacatcaatatcggaccacaaatcgcactcgcacattctagaccagcgggtaacgtccatgaaatcggattatctatcttaaaaacaaatcatagcattagtctagtcaatgatgaacaccccatcaatttatggttcgtattggccgcggtagataataacagccatttagccgttattaaagagttaatggagttgttaaccgatgagtcggcggtgacagctatgttaaatgcaactagtgaagttgatattttagaagttattgcacatgagcaagaattacaaaaataggaggatactattatgaaatttttagctgtatgtcaaagtggtctgggaagtagttttatggttcagatgaacattcagagtattttaaaggacgagaatgttaaagaagatatccaagtggatcattctgatgttgggagcgttggcgctgattcagcagattacttctttgttgaatcaacgcttcaaagtgcattaggaagtattcctgagaataaggttgtgttactaaaaagcttgattgataagcaagaagtccggaaccatgtcaatacaattctggatcaagaaaatattgaacatgattagccgctgaaaaggaggagaatcacatgaagactgttttgaacttatttgttggtattgtgacccaaccgtctattttagtagcgctaattgcgatgttagggctactacttcaaaaaaagaaaagtacggaagttgttcaaggaactattaagacctttgccggtttcttagtcttaactggtggtgccggaattcttcaaaatgcattgtcaccctttgcttccatgtttaagtttgcgttacatgtgcaaggagttgttcctagtaatgaagcagttgttgcaattgccctggttaaatacggctcaacaacagcactaattatgttagttgggatgattgttaatattttattagctcgttttactcgctttaagtatatcttcttgacagggcaagcaatgttatatgtttcttgtttaactgcagttatattggtaagcgctaacattggcacgggttggcaaacgattgtacttggtggtctatttgaagggacattattaacggtaacaccagcattgacacaaccatttatgcgtaaaatcacgggtggcgatgatgttgctatgggacacacgggtaacattggctatgcgctctcaggattgatgggtaaatggtttggtaatgcagaaaagtctacagaggatctagaaatccctaagagtttgggctttctgcgtgattcgacagtttcaattacgattttgatgagtattgtctacattattttggcgattgtgacaggtccagcttacattgaatcgaaactgagtggtgggactaattatattgtttatgcattagtacaagcaggaacatttgctgccggtttcgtggttgttttacaaggtgttcggatgattttggccgaaattgtgccagcttttcaaggtattgcgaccaagttggttcctaattctaagcctgcattagacgttccaattattttcccatacgcaccaaatgcagttttattaggattctttgtcagtttcattgttgggacgctaagtatgtttatcatgattgcgctaggaactactgttattattccaggtgtagtggggcacttcttctgtggtgctgcagcagcaatttatggtaattctactggtggtcggcgtggtgcaatcattggcgctacagtaaatagtttgttgattagttggttgccattgtttattttaccagttttgggaagcttgaaattagcagcttcaacgtttgcagataccgactatttggttccaggaatcttgttaggaaaattagggagttacggaagtgtagcagttattacaggaattatcttgtttacaattattgtgattctttgcagtatttttcttacccggcgtgctaaacgtatgactgatggaactaagtaatcagtaattatgagtactactttcaataatttacgaaaactaataataaaggagataaatctaatcatgaaatttttcttagatactgcgaatactgaagatattaaacatttcgcggaacttggtttagtagatggggtaacaacaaatccaacgttggtgtcacgtgaaggtcgtgattttgaaaccgttatcaaagaaattacgcagattgtatcaggtccagtatccgctgaggtaacggcaaccaaggccgaagagatgattgcccaggctcgcaatgaagttaagtgggcttcaaatattgtggtgaagattccgatgactgaagaaggacttaaggcggtcaaagtattaagtggtgagggcattaaaacaaatgtgacccttgtattctcagtttcgcaaggcttattagcggcaaaggccggtgctacttacatttcaccattcttaggacgtcttgatgatattggtggcaatggaattcagctagttaaggatttacgtcaagttttggatacttatggattcaagacggaaattatcgctgccagtgttcgggggccacaacatgttcaagaagctgcgttggctggcgctgatattgccacaattccagccgcagttttcggtaagttatggtctcatccattaacggacaaaggtttggccagttttgcttcggattggaaagcatttcaagcaacgcaaaagtaatcataatagcagcttaggaggtaagtataatgtttgataaagttgacgagctgggtgttaatactattcggacgttaagtatcgaagcaattcaaaaagcaaattccggacatccagggttaccgatgggagccgcaccaatggcctatgtgttatggacaaaacatctaaaagtcaacccacaaacacacatgaattgggttaatcgtgatcgtttcattctttcagctggacatggttcagctatgttatacagcctgttacatttagccgggtatgatgtttcgattgatgatctcaagcattttcggcagtgggacagtcggactccggggcatccagagtatggacataccgatggcgttgaagtaactactggtccgttgggacaaggcttcggtatggccgttggaatggcaatggcggaggcacatctagctgcccaatataaccgacctaattttccaattgttgatcagtacacttatacaattgtcggtgatggcgacttaatggaaggaatttcgcacgaagctggttcactagctgggcatcttaagctgggaaagttaattgcactttacgattcgaacggcatttcattagatggtaagacgtcgcaagcgtttactgaaaatgttggtgacaggttcactgcttatggctggcagcatctggtggttgaagatgggaatgatcttgatgcaattgacgcggcaatcgaacttgcaaaaaagacaactgaccgtccttctttgattgaagtgaaaacggtgattggttatggcgcacctaaacaagggactaatgctgttcatggtaacccaattggtgcggatggcattaaagcagctgaaaaagtatatggctggaattactcggattttgaagtgccgtcagctgtttcagaccggtttgaagtaactattcaggaaaatggtgcgcgtgctgagcagcaatggaaacggctatttgaagaatatgaggcgaagtatccagatcaggcgcagtcttttaagcaagcgttcaacggacaattttctgatgacttgaaatctactttaccgcactatcaattaacagatgcattggctagtcgggcggcaagcgctaaggcgattaacgctgctgccaaagtaatacctagcttatggggtggcgcagccgatttgtcgagttcgaacaaaacaatgattgcggaaacatcagactttcagccagaatcctacgatggtcgtaatatctggtttggtgtacgtgaatttggcatggcggctgcgatgaacggaattgtattacatggcggcactcgggtattcgggggaacattctttgtcttcactgattacttacgtgcggcagtccggttgtccgcactacaacacgcaccggttatctacgtcttaacgcatgattcaattgcggtcggcgaggatgggccgacccacgaaccgattgaacaattagctagtttacgatgcatgccgaacgtacaagtgattcggccagctgatggtaatgagacttcagctgcgtgggagcaagcactgaaaacaactgataaaccaaccgttctggtattgagtcgacaagccttgaagacattacctgtatcagttgatacggcctttgctggcgttgaaaagggtggctatgtggtcagtgctgctcaaaaagaaataccagatggtttactaattgcgactggttctgaagttaacttagcattggaggccaaagcccagttagcaaagcataatcaagatgtcgcggtcgtttcaattccgagctttgatcggtttgcgcaacaatcaccaaaatatcgcgctagtgtgcttccgagtgcggtaacaagaagggtgacaattgaagctggatcaacatttggctgggatcagtatgctggcgatcatggtgctaagataggtgtggatcgcttcggcacttcggcacctggtgacttggtacttgataagtatggctttaatgtaactaatgttgtgaatacttatctgaaattaaaataattattgaagaaatagaaacggggcgttgctcggtttctatttcgtgttcgataaagaatgaggatggctatgatggaaaatattaagatgattgcgattgatatcgatggcacactagttaattcaaaaaagcaggtgacattgcgagtcaagcaagcgattaaaatggcgaaggaaaagaagattaaagtggttatctgcacgggacggccattaacaggtgttaaagcattgttgcaggagttggaactcgatgctcaagatgatcaatacgttgtttgttttggcggtgctgcaacctacacaactagtggcgaactgattgatgaacgaccgattagttatgaagattatattgacttggaagccctagcacgtaagttacgcttgcattttcacgcggtatctgaggatcggctgtatacggccgaccgtaatattggtgattatacactctatgaagctaatctcgtttcaatgggtatctcatatcggacgccagaagagatgcggaatattaaactgattaaatcgatgtacgttgatgaacccgaagttttagacgctgccattaaacagcaaaaactatttgaaccgttgaaaaagcaggttactttcacgaaaagtacaccattttattacgaggccaacactaatggtgttagtaagggcaacgctttgcaagtactctgtgaaaagttaagtttgactgctgccaatgtgatggcaattggtgatgaagctaatgatttgagcatgattaagtttgcaggacatggagtagcgatgggcaacgctattcctgaagtgaagcaagtggctgatgaaataactgtcgataatgaacatgatggggttgcaaaggctattgaagaaatcacgagataaggataagtaggtataacagcattgttatatcggctataagggttacaattgattattgactcttaaagtgtttggaatagattaaattattttagagatgatttcatgaaaaaaactttattttttcagcaatgatcttatactaaaaagatgtaagcttattggcttatcaaatctaaatattattttcgaggaggattactatttatgtgtactgccataacttatcaatcttataataattacttcggtagaaatttcgattatgaaatttcatacaatgaaatggttacgattacgcctagaaaatatccactagtatttcgtaaggtggagaacttagatcaccattatgcaataattggaattactgctgatgtagaaagctatccactttactacgatgcgatgaatgaaaaaggcttgtgtattgcgggattaaattttgcaggttatgctgattataaaaaatatgatgctgataaagttaatatcacaccatttgaattaattccttggttattgggacaattttcaagtgttagagaagtgaaaaagaacatacaaaaactaaacttggttaatattaattttagtgaacaattaccattatcaccgctacattggttggttgctgataaacaggaatcgatagttattgaaagtgttaaagaaggactaaaaatttacgacaatccagtaggtgtgttaacaaacaatcctaattttgactaccaattatttaatttgaacaactatcgtgccttatcaaatagcacaccccaaaatagtttttcggaaaaagtggatttagatagttatagtagaggaatgggcggactaggattacctggagacttgtcctcaatgtctagatttgtcagagccgcttttactaaattaaactcgttgccgatgcagacagagagtggcagtgttagtcagtttttccatatactagggtctgtagaacaacaaaaagggctatgtgaagttactgacggaaagtacgaatatacaatctattcttcttgttgtgatatgaacaagggagtttattactatagaacttatgacaatagtcaaattaacagtgtcaatttaaaccatgagcacttggatacgactgaattaatttcttatccattacgatcagaagcacaatactatgcagttaactaaaagccactactgtaatagttaaaattgtttaaaagaggaaatcagtttgttatcagttgatttcctcttttatgtatcactgttttcagagtaagttccaatggctggcattgctgttaatatgacactagatgatataagttatcatgttaagctcgatggtaagttgggtttaattgatagaaaacataatagttatgagatgcttgaaatacctactaaaatacattttcaccaaattttatatgatcatgttttgaataaggggattaatttgagcgactggatagacattaagatattaatgacaagtttatttaggaaaagagcacgttaatatatccaatagtaattgaaataataaacaccttaggagtgattggtatcctaaggtgtttattaaagttaaggattaaaatattaagctactattctcgataacagctactgtcattatcgtaagtgagtttaacaacatgatcagacaattcaactgtgatctgctgataaactggttgataaccgtgatgagtgagttgcacattaaccttgttatgatcaacggtaattgtgtaattgttccattcacctgactgatacttaaagtcacgtccattatcttgatagtgttggtaggtcccttgagtaccaaatactctaaacgtcatcgctttcaacggttcatcgctaatgtggctaacagcgggtccccatggcaaaatggtgttttgttttacaaataatggtagtttatcgagtggggtatcgactacaatatcctgattaccggcatactcagcaccgttccaaaaatcaacccagttcccagctggtaaataaactaaccgcttaaattgagatttttgaacaacgggggcaactagtatgtcgtcaccaaccatgtattcgtcattcaagtcgcgtacacgagggtcctgatcgtagtttaagacaacgggacgcatgattggtaagccagttttggtttccttagcaaataaatcgtatagataaggaatcagacgataacgcaatttgagatacttgcgataaatgtttaacgttggctcgccaaatgcccatggttcttgttggcgagtccctaatgctgcatggttccgtaacagtggactgaaaattgccccttcaatccaccgtgtcagtaattcagatgtcgtgtctgaggcaaagccaccaatgtcagttccagtaaaactaaagccacttaatcctagattgcagagttgtgggatcatcatttggatatgtggccacatactgcggttgtcaccggtccaaacagtcgagtatttctgagttccggcgtaagctgcccgtgtgatgacaaatggtcggttgccattttgctcttttagtccagcataggttgctttagccatattatggccataaacgttatgcatcttcttatgtgttgaaggcgtgtcttgatcattaaagaccacgtcatctggaatcggaccttcgaacgtagcgggttcgttcatatcgatccaaataccagcgacacctaaatcagttaaaaatttaccgttgttagcccaccactgacgaacttctggacgaccgaagtctggaaaagcagcgttacctggccatactttgttaatatagacatcaccgtcagcagatttaacgaaatagccttttttaagaccctcggcataaatgtgatagtcagaatcttgtttaacaccgggatcgatgattgggatgaccttgagaccctgttggttcaacttggtaataaacttcttgggattaccctggtatttatccttgtcccaggtgaagacccgataaccatccatgtaatcgacgtcaaagtgaatcgcatcgcatggtaagtcgtactttgcaaggttatctgcaattgcttgcacttcttcttgactagcactgtagccccaccgtgattgttggtaaccgagcgtccacttttgaggtagtggcgttcgaccagttaaataggtgtaattggtgacaatgtcttttaacgtggtaccaccaataatgtagtagccgaggttaccttggacagctgaataaaagtagtaatggttgctttccttacccatatctaaatggctctggtaggtattgtcgaagaagataccgtaaggatgtccattctttagccccaacatcactgggattgacttgtaaatattaggtaggatctccagctggggagcggggttatcaacgttccaattatcataggcaaaaccacgtttgttcagatatccggtcttgtcaccaagtccataaagatattcatcaggtgctagcgatttaatgatttcgtagtaaccttgatcagatttagtaggtgccttagtcactgaatggccttctgcctcaactaatcgttcatggactttgtcgacgcctttcaagtgaatgcgttcaccacgataatcggtaatcaaggcattgccatctttatcaaaggtatcaagatgccgttcggaatcgaggtgaatcgttaaagctgatgtccggataatgtaatgatcaccagcactttcaatagtgaaatcagtcgcctgaattttatgaccctcaattgcataggatccaccttgctcaccgcgattaataaagacgcggatgatttccggcgtaacaatagttaattgtaatggttgggcgaaagcaaacgtgatcgtttggccgttctgtgtgtaacttggtaatgcactcatattaaaaaacactccttagtaaaatgacttttatttagttggattctctgacaaatcttcttgaggcttgtcttgcttaataatactaatggcaagtactgcgatgaacattgagataccagcaataagcatcattccaggcatcgaattaccaacgaatttaaagaccataaagctggcaacggatgcgagaatttgtggcaagcaaatcgtaccgttaaaaattccaatatatgagccttcattggcaccatctagtgaagaagtaaagatattaaagggctcgacatgcaccgtaaagaagccgataccgattaaacagaatggggcaattaataggtactggttgtgaatgaagaatacccaaacgaggccaactgcgaagctagctaagccaaagcgataccaaaactttcgcttgtatggattagtccgtgaaagaactaagaaaccatatagaacggcggccattgattgaatgaaggtcaagattccataccaattaccggcagcttgatagccagccgaagcagcattagttgtgtgccaaacgttttcggcgatagcaccagtagtataagtccacatatattgaataccaatccaggcaaatagttgaacgagggcaacttcccagaaagctttcggggcttcttttactaattgccaaataggcttggtgtgcttatgttgttcaggatcgatatgatgataaagtgcgtacgtgtcaggatcatattccttaaccgtatgaatagtatatgctgagatgcctaataaaataatggcaccaatataaaacgcaattcttacagaaagagggacaacgcctttttgcgccgtgtttgcaacaccaaagtaagttaggacgaacggtagaatagtagcaagtacgcctcctaggttactgaaagcttgttgccaagaccatgctttgtccttctgattttcattaaccatatctccaataatcatgcggaatggttgcatgcaaacattacttgataaatccataaataaaatagcaatagcaccaaatagtaatgcagcagttgaagcgtagccaaagccgaatgaaccagcatttggtaataacaccatgaccaacgccgctaatggtgcgctgaatagtaagtagggcattctacgaccaaagcgcgtccaagttcgatcagagtatttaccgactagtggttggacgaataatccagccaatggcggcagaatgaagaagagtcctagtttggtgggatcagcgccaatggtctggaaaatccggctcatctgtgatgattgtaatgagaaggccatattaaccccacaaaaaccaaaggtaattgcaaagatggtttttaatgggaggttgggcagcgaattagcaataatagatgtcttaggcttactggaaacatcagcgattggtttattcgggtgtactgcaggttggttcatgagaatccatctccttaaaagttaatcacttttcaacagggcaatactagcacttaacgtaaacgtttacaataccgttttaataataaagtaaacgtttacgcttttggcaatgatttaaccggcttttagcgctataattaatttaaatcggaggggagctggaaaaatgaagccaacaatcaaagatattgccgctaaaactggcttttcaattgctacagtgtcacgagtgttggcgaaaaaacagggtacatatagcgacaagactcaggagcgtattttaaaagttgctaaggatctcggctatcggaagaatacactagccatggaattggttaaaaagaagacggacgtgattgccgttattgtcaacgtcacgccgacgaatttttcaagtggaattattgatggtattcaacagcgcgcgactgagatcgggttacaggttattattctatatgctggtaatcggaataccgagttacaacatcaagcaattgtgaccgccttggaacgtactgtttcaggtattttgttaatggcgattgaaccagataaagcagacttacaattattaacagaatcaaagacaccgttttgttttgtttcgatcaatctagcagatgaacgcgtcaaatccgttagctctgacaattatcaggcggcctatttggcgacaaagtatttaatttcgcatggtcatcggacaattggcctagccggaatcgaccattatcatacaggtagtcaacggcttgctgggtatcaagcggcgttaaaaaattattcgattcatgggcaagctgaatgggtgcaacccggagattatagttatcaggctggttataatgtttttaatgcttatcaagagctgggcattactggggttgttgcagctagtgatatgacggcggccggactacaaaaggctgctcaggagagtaatgtgaagctacctggggcgctttctgttgtcagcattgatggaacgctcatctgcgatattgcgactcctgcgttgacaagtgttacccagaattttgtccagattggtattgaaagtgttaattgtttggttggcaaatctgccacgcggttagtcccagtcacattggttgaacgtgagagtgttgcaactatataaagcgtactgagaaataattttagcttcgctgacctgataatcgagaacttgattgtcaggtcagcgaagctttttggttacaacgagattattccgtcactttaaatacgttctcattaacgttagtatattgtcggtactaagcgattgttttatgcgaaaagcagcaaagtgattctcaaatcgatgaaaccgctttatttcggatgctatactacagcaaatgaagtcgaaagtgggggagactatgcaaattgataagttaacattaaaagatgtggcaacgacgaatcggcagtatctggagacgatttttgccttgggtgatggtcacatgggtgttcgggactcagtaccgtttacaggtaatcaacaagcaacactaccagtgatgctcatcaatggctattatgcgacgaatccaatcacatatggagaaagtgcctatggatatgcgaaaaatcatcaaacgattatttcattaacaagcccgcggtacttagactttgcaactgagaagacaagttctgagattcctggtgactgggatatgacggtcgacgatgccgtgcttgattttgatacgggcgtactaacggaaaagtttcagattgttacctccgaccaccatcattttgaactggtcgttaaatcaatgattgcgttggataattcgcatcaactattcttgaactacgaactgacttcgcttgattatacggggacgttgcggttcacgcggccgattattcatgatgtaactgcgacgacggcggacgcggacgatccgcgagtggcgcaacgacaatctgggttaaccaaccaatttataccagctgatcgtcagcagcaaatagagtggcagacgttggtagcttcaacacaccaacaaataacgcaacgggattggttgaccagctttccgacaggctttgaagtatatggcgatcatgccggttttcatggcagtggtaccatcgaagtacagacaacgctgagctggtcgtttacgcgccaaatcagtgaaattaatcaagcgttgccggataagataatgggttggaccaacgatattgtggctcgtaatcggcagattttaacggacttttggcaacagtcgcaagtgcaaattagtgataaaaagttacaaactgggattcaatataacttgttccagttatttcaatcagctggtcgtaacgggttaacgaacattgcagctaaagggattactggaccgggctatgagggccattatttctgggataccgagatgtatatgttaccgttcttcatttatacgcagccacaaattgccaagcaactgttgcattatcggtttagtgttttgccgcaagctcgagagcgggcgcggagcttgggtgtgacacggggcgcattgtacgcatggcgaacgattaatggtgaagaagcaagtgcctattttcctgctggcactgcgcaatatcacatcaatgcggacattgcgcatacggttaagttatattttgatgtcactaatgatcagaacttcttgcgggaacaaggtgcagcagttgtcctggaaaccgcacgtttctggttgcagtttggtagctggcaacagcgtgatggccggtcgcaattttgcttatacaaggtgacggggccggatgaatataccgccttggtagataataattactatacgaatcggatggttaaggaaaatatggcttttgcagcttggctactcgaaaagcattatattgacggcgatgctgatgaacaagtgcagttcacaaaggcaagtacgaacatgtacctaccgtatgatcaagaacaacaagtcactgcacaagatgatcattcaccaaagatgccggtgtggccctttgcgacgacggcagcgacgcaatatccactgttgttacattatcacccgctcatgatttatcgtcaccgggtcaacaagcaggcagatacgttattagcagaaatgttgttcccagaagatcaatcgcttgaacaactacgtcgggattatgcttactatgaaccaattaccacgcacgattcttcattgtcacgttcgatttttagtattctagctagtcggttagatgatcgtgataaggcttttagctactatatggatacgtcgttgatggacttagttgatttacaaggtaatgccaaggatggcttgcatgaggccaatcttggtggtagttggttgggattaacatatggatttgctgggatgtatgtcgctgacggcaagttacacattaccaatcatttaccaactcagatagcacatcttagttatcggttgcgttttcgtagtcgagtactagaagttcaactatatcaagataaaacgcaagttaagcttgtcactggcttaccgttagcagtggtagtggctggaaaagaatatgatgtattgcaaggtgtccgtagcgaatgatgaaaacttatagcgaattgaccagatggaagtagtacaaaaaatatttacacacggttgataccgcttacaattgttgctaatatatacagcataaataaaagcgtgttactgactcgatcaggcataaacctactcataactgtattcatagtctctttggtgagatgtgatactttttaagtaggttttttgtttgaaatccaggaggcgtgagtggtgaaatttctaaagaacttcaataataatgccgctttagtggtagatgatcaggatgttgaatggattgtagttggtaacggtgtaggttttggtaagcatcagggtgatcagattgatgatcagaaaattcagcggcgtttcgtggcaactttgaaacagaatgttgatattgatgactttcaggatttgaaacctcagtcttttgtgattacaacaaaggtggttcacctagtggagccgctgttgaaggtcagttttagtgattatcagtactttgtgcttgcagaccacattgattttgcgttgaagcgagccaatgatggaatcgatgtcgataacggtacagtccgttgggaagttaaaaaattgttccctaaggagtttcacgcagccagtcaagcggtcgatttaattaatgtgacggcggacgtgatccttcctaaaagtgaagtggtttttatgacttatcacttcatcaatgctggttcagatggttccaagttgcaggaaacgattaaaattacgaaattgatcagtggcatcattgatatcgtgcaatatcaataccagatgcatctggacccagagtccttcaattacaatcgtttcattgcgcatttacgtgcgctaatggtgcaacgcgttagccgcagtaatggaactgggagtgaattagatcagtcattactgcagttgatgcaagtaaaatatgcgcatgcctatgcaacagtggagcggatcgatacatttttacaaagtaaggctggctggcgactagagccggacgacaaagtctatttgacccttcacatctggcgcgtcacccaccgacaaaaaagtgaataaataagattattaacggtgtgttactggttatgcaggcattaacccaaatatcttttcttgagagcagcagtcactagggccctagtggcatggtttgaagaaaggacatttgggtttttgtttactcaaattgcaattattgatttatagataaatgaggaggaacaatgatggcttatgaagatttaagtaaaaagattatcgccggagttggcggtaaggataatgttaagagcgtggttcactgcacaacccggttgcggtttaagctcaaagatgaaagcgctacccatactgatgaattaaaagatacagatggtgttattacagttgttcagtccggtggtcagtaccaagtagtcattggaaatgaagttgcagacgtttatgaaacgctcattcgcgtcggtggttttgccgatggtggtagtgtacctgatgattatgaagacggagaaaagatgagtatctttgaccggttcatcgatttgatttctggtatttttactccgatgttaggtgttttatgtgcggctgggatgatcaaagggttcgttgcgatgtttgtcgcgttcaattggttgtcagagaattcaggaacatacaagattctctactcgatcggtgatggtttcttctatttcctaccaattgttttgggattgacagcagccaaaaagtttcatgttgatcaatttgtcggaatggcgattgggatggcactttgttatccaagtatcgtcgctttgaacagcagtaaaacagtattaagcacgctgttcagtggcagtatttttgaatcacagattcacgcgactttcttaggtattccagttgtgatgatgagctatacttcttcagtaattccaattatcttggccgtttggtttgcatctaaagttcaggcatttgcaaaacgaatcgtgccaacggtagctaagacgttcttagtcccatttattacgttattaatcgcagtgccgattacctttttaattattggaccagttgcaagttggttaagtgatggtatttcaacagtatgtgttgcaatctataacttcagtccgatcgttgctgggcttgtgatgggtgctttctggcaagttttcgttatctttggtgttcactgggggttcgtagctgttatgatggccaacctagcctcacaaggctttgaccctattttaggattatcattagccgcttcgtttgcccaaactggagttgtattaggcattctattacaaacgaaaaatcaaaagacacgcggtattgctttaccagcctttatctccggtattttcggtgttacggagcctgccatttatgggttaacattgccacgtaagcgcccatttattctgagttgtgtggccgcttcaattggtggcggtattattggttttgcaggtacaaaaatgtatatgatgggcggtatgggattattctcaatcccagctgcgattaattctaaaactggggtagacggctctgtatatggcttaattattgcgatggccattgctgcagtccttggttttgccctacaaatgttatttggttacaagagtgttgatagtaatgacaagcaaactaaggtcgtagaaactgcggcaactgctgatccagtcatggtcggtggtgtttcagtagaaacgacaccaactggtgcagcaactaaagtagaaccaagcgtcacttacaatgcggccactaagttaagtagccccgaaacgggccaaatcatcccactaagtgaagttaaggatgaggtcttctcatcaggtgcaatgggcaaaggtgttgcaatcgaaccaactgatggtgtcttatacgctccagctgacggcgaagtagcactcgtattcccaactggacatgccgttggtttaaacacaacagatggtgctgaaatcttgatgcatattggaatggatactgtcgaattagagggcaaaggttttgaaacgctagttcaaaagggcgagacggtcaaagctggtcagccgctagtgaagtttgatattgaagcgattaaggcggcagggtatcccgttacaacgccaatggttgtgactaattctaagaactatcatgacgttaaactggcctttccagctgctacggaagttaatgcaactgaaccattattacaattagactaattaaaagggagttttcaattatgtattcaaaaacaatgccaactggctttccaaagaactttttgtggggcggcgcgactgctgccaaccaagttgaagggggttggaacgttgatgggaagggcctaacaactgctgaagttgttcagaaggctactgaccgcaaagtaatgtcgatgaacgaggttactaaagagagtgtccaagctgccattgatgatcaaacggataagctttatcctaagcgccgtggcgtcgacttctatcatcactataaggaagacattaagctattcgcggaaatgggcttcaaggtataccgcctatccttagcatgggctcggatctttcctaaaggtgatgaaactgaacctaatgaagctggtttgaagttttatgacaatgtttttgctgaatgtcacaagtatggtattgagcccctagtgaccatttcccactatgaaatgccattaaacctaacattaacgaataatggctgggcaagtcgcaagacaattgcagatttcactcgctatactgaagtgctattcaaacgctataagggtgttgtgaagtattggctaactttcaatgaaattaacgcttcaacttggggatttactggtactggtgcaattgatagtgatctaagcttacatgatcaaatgcaattacgctaccaagcgctacatcatgagtttgttgcaagtgcaattgcagttaagcagtgtcacgagattgatcctgaggcccaaattggctcaatgcttgcgcggatgcaaacttatgccaatacgcctaatccagctgatgttcgggcggcccaattgcaagatcaattgaatttgttctttactgacgtacaggtacgtggtgaatatccagaatatatgaaccggtactttgcagaaaacgggattgaattaacgatggcagctggcgatgaacaattgttagctgaaggcaaggtcgattacttaagttttagttactatatgacgacgattacttcggcgactgatgatgttgaacaagccagtggtaacttatcaatgggtggtaaaaatccatacttgaaatccagtgcctggggctggcagattgacccagttggtttacggattaccttgaacgagttctgggatcgctatcgggtaccattattcgttgttgagaacggcttgggtgccgaagatgaaatcagcgccgatggtaagattcatgatgattatcggattgactacttacgtcaacatattgaacagatgaaagaagcagtcaaggatggtgttgatttgatgggctacacgacctggggttgcattgatgtcattagtgccggtacatccgaaatgtctaagcggtatggcttcatctatgtcgatcaagatgatgaaggtaatggtagtttgaagcggatgaagaaagactcatttgactggtataagaaagtaattgcttcgaatggggaagatttgggatagttattaataattgatattcagaccaatgattgattatacttgttgtaagggctatcattattagctaactagaaagggtgttgattaaatgtcagagttcccagaaggatttctatggggcggcgcgactgctgccaaccagttagaaggtggctaccaagaaggtggtcgtggcttatcgattgcggatgcgttaccaggtggcaaagaccgatttaaaatcgttagtcaaccagattttgactggacgatcgatacagataagtacacctatccgaaccatgaaggtattgatttctatcatcattacaaagaagatattgcactgtttgccgaaatgggtttcaagtgttatcgtttctcaattgcatggtcacgaatttttccaaacggtgatgaaacgcaacctaacgaagccggattaaagttttatgatgatgtgattgacgaatgcttggccaataatattgaaccagtgattacaatctcacattatgaattgccattgaacttggccaaacggtatggtggctggaagaaccggtatttgattgaattctacgaaactttcgcgcggaccatcttaacgcgttatgcttcaaaggttaagtattggatgaccttcaacgaaatcaatagtgcggcacattttccggtgatgggccaaggattagtgccatcgacgggtgctaatgacaaaaagaacgtttttcaggcatggcacaatcagtttgtggccagtgctaaggcagtcaaaatcgcccacgaattgcgagacgatattcaggttggctgtatgattctctatgccactagttatgcttatgattcgaacccagttaaccagctggctaatttgcagcataatcaagatttcaacttcttctgtgcggatgttcaagtacgtggagcttatccgacctataccaagcgactgctggctgaatataatctgacctttgatgatctggagaccacagatggcgacttggcattactacaacaatatccagttgattatattgggtttagttattatatgtcgagcgcggtggaaaccacgggtagtgtaaccgatactgttgctggtaacctgatgggcggcgtcaagaatccatttttgaaggcgagtgactggggttggcagattgacccaaccgggttacggattgcgttaaatgagctatatgatcgctatcagaaaccgttgtttgtggttgaaaatggcctaggtgcgattgataaacctgataagaatttctatgttgaagatgattatcgcattgattatttgaagcaacatattgaagcgatggctggtgccattgatgatggcgtcgatttgatgggctacacaccatggggttgcatcgaccttgttagtgcatcaactggcgagatgagtaagcggtatggctttatttacgtggacctagatgatcagggccacgggacgttagctcgctatcccaagaagtcgttctactggtatcaagatgtgattaagcataatgggttagcggagaaatctgaatagttgaaatgcaattagtgatatctgacagcaatatatcattgatgagatgatagaaattggcatttaacgcttgcaatcgttttccgaaaccgctatactagctaattgtaaataaggattgttaccgctaacattagctagtgggcaaaacctaattaatcgattgtattcgtgattgatagcacggatgcagtgggttattaggtttttttctttatttaggtatgagagtcgaggagcgtgcgcatgcgaatcaaaaaggtttttaataataacgtcctattggctgaaaaaaatggacgggaagttgtcttaattggtaaaggaatcgggttcaaaaagcatactggtgacgatgttgagcaacaacagattactaagatttatacgccagaaggagataattggattagtaatttccaaagcttgatggcagatattgaaccggaatattttgaagttgcttcgtaaattattgagttggcagaacaacaattgcaaacgacttttaatgtttatttgttgatttcattgactgaccatattcactttgctgtctatcggcaccaccatcagatggatattcataatgaaatcttgtgggaaactaagcgaatttatcaccgtgagtttcaagtcggcatgcaagcattggcactgattaaaaagcattttgatgtgacgttgttggaagatgaagctggatttattgcaatgaagtttgttgagaatagtatggctgactctaacactgatcaaacacttgcaatgactaagttgattaatgatatcttgaatattgttaagtatcagctgtcattaacgatgccagatgagagtgttagtttgcaacgatttttagttcatctacgcttttttgcggagcgtttaacgctgaaacgacctgatcaatcccaaggggcagatgatgatttcttatttgaacatttatctaagcaatacccccgagcctttgcctgtgtccaaaaaatcgctgtttttgtgaagaagtcgacggaacagactgtttcggtgaatgagcgtatttacttaatcatgcacattcagcggatgttgaacgagaatcaataatatttttgggattgtaactattcgattaggcaaaacccaagtagcaaccagtcaacctgtgtttttagtgttgataacgggcctacttgggtttttgtcgttttataaagggaggaaaaagtgtatggattattcagaattagcacaatcaattcttaccaatattggtggaaaagataatattagcaaagcatggcactgtgcgaccagactacgtttcaacttaaagtcaacggacaaagcgaatactgaggcgattgaaaacttagatggtgtcattacggttgttcaaagcgcgggccagtatcaagttgttattggtaatgctgtggcgcaggtctttgccgttttagcagatttagcaggattagcaaatcctgatacggcggctgatgcagctactacaacggaagatacgggtgaaaagcaaaacatcattaatcggtttattgcttttatctccggaatctttacgccgtttttaggtgctttggctggtgctggtattttgaaagggttgctagctttagcggttgcttttaattggatgtcaacgactagtggggcttataagatttggtattctgctggtgatgctattttttactttttacctgtctttctagcatttactgctactaagcagttgaaggttaaccaatttgtagcggtgtcacttggtgcagccctgctatacccaactttagtaactgttatgacgaattcaacaacactacatttctttggtattccggtggttccaacaacatacacgtcaacggttatcccaattctactggcagtttgggtattgtcgtatttggagccagtgctggacaagctatttccagcggcaattcggaatattttcacgcccctcttttcattaattattatggtgccattgacgctgttagttgtcggcccaattgggggactcattggtaatggattagcaagtggtgttatggcaatttataacttcatgccaattggtgctggtgttatcatgggtgccttctggcaagtctttgttatctttggtgtacattggacgttcgtaccattgatgatgaataatattgctaagatgtgttatgacccgttgttaccaattcttagtgcggccgtattatcacaggctggtgctgcgttagctgtttttttgaagtcacgagatcaaaaaatgaaagcattagcagggtcttcttttgtcacagcattgtttggaattaccgaaccgacgatttacggggtaacgcttaagttaaaacgaccattctattgtgccgttgtgggtggtgcccttggtggtgcaattattggcgccgctggtacgcacgctagctcatttacactccctagcttattagcggtaccaacttttctaggacatgggtttatgggtgaagtcattggattgattgtagcattcttaggtggtgcgatcttaacgtacttctttggattcgctcgtcaacagcaggctgatcactcagtagtaagtgatcaaagtgataacacagtaatggctccggttgaagggacaattattccattgactagcgttcatgacgaagtatttgcgtctgaagcaatgggcaaaggattagccattgttccaaataaagggacggtcacagcgcctgttgatgggacaatcacggcagtatatcccactggtcatgcgattggaattacggccaatagtggtgctgaaattctgattcacattggtattaatacggttcaattaaatggtcaatacttcgaaacaatggttaagcaaaaccaagtagtcaaacgtggtgatttattaactaaatttgatgtggataagatcaaaacggctggttacgatacaactgtcatggtcattattacgaatacggctgactatcaaatggtcaagccaactgatgcgacggaggctagtgataattggattttagaattacaacctaaggagatcatggaaggagcaccagctaatgtataaaccaacttatcctaaaacgttccctaaagactttttgtggggcggagcgacagcagctaatcaagttgaaggtgcctggaatgaagcaggtaaaggcctgacaacggcagaagtagtgaaaaaaacgacggatcgcaagcatatgtcaatggatgatgtaacgatatcttcaattcaaacggcgctagatgatcaaactgatacaatgtatcctaagcgtcgaggtgttgatttttatcatcattacaaagaagatatcaaactatttgctgagatgggatttaaagtttatcgtttctctattgcttggtcgcgattatttccaaaaggtgatgaactcaagccaaattcagatggacttgctttctatgatcgagtcattgatgaattgcgacgctatcacattcaaccattagttacgctgtcacattatgaaatgcccattggattaacgcttaagcaaaatggatgggccagccgggcaaccattgccgattttaatcggtttactgaagtcgtttttaaacattttaaaggtcgcgttccgtattatttaacttttaatgaaattaataccggaacttgggggtttcatgccactggagctgttgatactgagaattcggcgcatgatcagatgcagttacgttaccaagcgctgcaccatcaatttatcgctagtgcactggctaccaaacaattacatgctattgacccggatgctaagattgggtcaatgctggcaagaatgcaaacttacccagccacacctaatcctgcagatgttcaggctgctcaagtggaagacgataagaacttatttttcacggatgttcaagctcggggagaatatccagaattcatgaaccgtttttttgcagagaatgatattcaactgcaaatggcaccagatgatcagacgattttagcgaagtatccggttgactttattagttttagttactatatgacaacagtaactcaagctgatgcgcctgaacaagtgaacggtaatatggctactggtggtcgtaatctttaccttgaggaatccgattggggttggcaaattgatccggtggggttgcgagtgacactgaatgagatgtgggatcgctatcgtaagccattatttgttgttgaaaatgggctaggcgctctagatcaattaacaactgatcaacaagtgcatgatacgtatcggattgactatttacgtaaacatattgcgcaaatgaaagctgcagttcaggatggcgtacaactaatgggctatacgatgtgggggccaatcgatttgattagtttttctacctcagagatgtccaagcgatatggttttatttatgttgaccaggatgatgctggtaaaggaagtctgaaacgttataagaaagattcattttactggtaccagaaggtcattaaatctaacggtgaagatctagcttaattagttaatgatggtgaatttacgtgatataagaactgacttgccgctggtgtgatcaactgatgggaaatgatactgttagcatccacccagtttaaaatagcatgtgaattgcagaaatttgctttgataagttggattaaactaaaaaggtctatctcgaaattattaaaatttcgagatagacttttttataatcagtaacatattttttactatattcaatccacaaaccggaacttactccaaggcttaataaagtcaagcagtaacagttcctcaggtgcaatccgaccaatccgattctttcggggttcacagtggggttgtaagacgatttgcaattcatttttataaatgccgaagttgtcgttgcctactaatacgtcgccacgctgaaattccacatcattatcgtgtggactgttgggcgtttccttgtaggtcacacggggcatggttgaacggatgacatttgggttaatatcgccacggcgaaaatgttgtggggtcaaggcaatggttctttcgattgcattcgtctgggcttcaaattcaatgtgaaattgtacttgataccgattgattgctgataatgcggccagttcggcttcactcgcataagcgttaccgataattacatcgtcgattagtccggaagcgaagagatgcttggcctggacggcgattggtaagcgccgatcagcttctaatgttggcagaccatcgttgacgttccatggccccatcgtaccaacctgacttgccacgaaagcggcggagtgaatgccgaacttacgaaaacgttcgctacacttaacgaaaaagttgtaaggtagtgcggttccaacttggggatagaaattatggcagccataaataaatgggacgtttgcttggtagctgagaatattattcagataatcgacgtcattactcatattaagttcgatgatcaagccgtacggattatacgagagcagcgcctcggtcgcgccatcgaaaccctcatctagtcgaataccggcgacgtgtaaatcagcgaaaaactttagatctttataggaaattcctagttgtttaaaaatccgtggtgaaacgtccaaaatcgtttggtaacccaactgatttccaacgtcaatgattttctggtacttagctttggtttcggcgaccgtaccagatacttccagcatgctcataaaaattcgagtgaagccgtagtgttggcctaatttgagataagcggcgttttcttcaaagtcgctatgatcgggataaatggataaacctagttgacgcattgtcatgaattaatttcctcctgagtccaccggtgccaatagatgacggcgtgggcgttgttagttgtaatatcgttaaatgcaattgttggtattgactggtgcactgtcgtcgttaacgtgtcgcggaccaggcgattgtgttttaaaacggaaccagagagggcgacccgttgtggccgggactctgcaaaccgctgatataaggtaacgacttgttgtgccagtgcttgggctgacgtgactaataccgtgatggcttcagaattttgttgctcggccagtttggcgattaactgtgctaattgagcgttagtttgtcgatcttgagcgtaaaatttctggacggcggcagcaacatcggtaactttaagttgtgccaataggggagctgttagttgactagtttgaccgttatcagtctgggtcagaaccagtttaagtgcccgcttgctaatgtcgtaggcactgccttcgtcacctaaaacgtaaccccagccgccaacgcgcagaaatttcccggcttggcggccataaacgaccgaacccgtgccggcaatcactaaggcgccgtctgctcctgcaagaccgttcagtagggccagttttgcatcgcttatgacctgggtattagcgtggtaacgttgggtgatggttttttggacctgatcagcccggccagcagtttcaatgccagcaattccgattaaaatcaacccaatctgactagctggaattgcggcagtgagctggtctaagacagtggttaagttagtaacggcagcagagtagtctaggacaacgttaccagggccacccgtaacgctttggaccagatgctcgggggctgtcgtccaagtttgaccaacgatgtgcgtgccaccacagtcaacgccaattaaatatgtcattttagacctcctcattgcagtgcgagtgcgtcacgaacgacaccgtgtgcgcgctgtaaacgctgctcggcgtcgctgacagagacgccagccaagtccatgacaatcgctgtcttaacgttttgatgagctgcagcgaatagttcgctggcttcatcggcagaaacgccggtggccagttcgatcatgtgtttcgcgcgaatcacgagtttttcgttagttggtttaacgtccaccatcaagttatggtaaactttgccgatcttggccatcgaaattgtcgatagcatgttaagaaccatcttttctgctgtgccggctttcaaacgggttgaaccagcgagaacttcagggccgggggttacttcgatggcaacctgagcgtgttgactgattagtgcctgattattgcaggctagactgattgttgccgcaccgattttttttgcgtagtccagtgcaccgataacgtaaggcgtgcgaccacttgctgccaggccgaccacggcatcattagcagttaaggccagatctttcaagtcttgtgcgcctaaattaggattatcctcagcaccttcaacggcgaccgtcatagcttgagctccgccagcaatgagtccttgaaccatctctggttcagtaccaaatgttgggacacattcagcagcgtctaaaactcctagacgaccgctagtaccagcgcccatgtaaattaagcggccgttagctttaaaggcagtgacgataagggcaatagcagcggcaatttgtggtagttcgggtgtgatgctttgactgactttagcgtcttcttgattcattaactgggcaattgccaggatcgacatttcgtctaagtcgttactggcaggattacgaccctcagtagtaagttggttaatatcagatttcaatcgttttccctcgtttcttaaaatatgtacaaagaggactgcagccaatgcagcagtcctcccagaatcataatcataatggctaattacggttggcgctaaagttagaccgattgtcagcaaataagcaatcatgttcattgaaagtagtcgttagtttaagcataccgtaatgacaaatccgtgtgattttggtgcaatctattattcggcaacggctgctggagctgctttttcagcatcggctttagcagcgtcttgttcagccttcaattggttacgatcccaaatcttgaagaatgggtaatagataaaggtggccacaataatattaataatacatagaacggctgctcgccagtcccaagcagtggtcatcaacgccccaattggtcctggtaatgtccatggaactaaagctaccgtccgactaacgaggtgtagaacagttgcagcccaagtgataatccccatggttaacggtgcgaggacgaatgggattgcaaagtatgggttcatgacaattggaacaccaaagataacgggttcgttgatgttgaagattcctgggataatggtaacccgtccaattgttttaccgtaagcggacttagagaaaaatgctaataagatacagaaagacagtgttgccccagcaccaccaatgtagacgaaccattggaaaaattgttcagtcatgaagtgaggaaccgttgcagcagttgcacctttggaaatggcagctaagttatcgttcaggtttggataccataatggccagaagattggggtggctaaagcagcaccgtgaatcccgaatagccaaacaatatcagttaagaggattggtacgataactgaaagtaaattgtcacgaccaaagtaggctaatgggctgaagacccattgtaggaaagcattaacgtcaaagttcaaaccaacgtgaatgacccaagcaccaacgattaagaaagtcgcgggaatcaaagctgagaatgaagctgcaacagccggtgggactccatctggtaatgtaatgacgaggtgatggtcgcggcagatccgagtcacttcggccgttaaaatcccagcgagcattgctgtaaataaccccgcagccccgaagtgtgttagcggcaccacggtggcagcggcctttagtcctaacgctttgaaagctgctggagtggtcgtaattggtttaactgccaacaatagaaagaccatcactgagacgaccccggttgaaatatgatcgaagtgataatcttcagctaaccgacctgcaatggcaaacgcggcgtaaatagccataaaccccattgaaaaattaattggaattgctaaaccagcggcatagggtttaataaagtttgtccaagcagtaataggtagttgcgtgacgatcgtaaagaatgagccaacgatggtaactggaataatgacggccattccgtctcgaatagcacgtaaataacggttggctgcgatcttactcatgacatcaatcgtcttatctttccacgtacgtgaattatccataattcattcatctccttaacaaattagtaatgacaagttagtgttgaattaagtcctccctttttgatttgagttaacacattaacttgatttcatgagtgagtatagcataatataacagtatagttaacgctttcattgttgttagttaattgacatgggtaaattttgattaagtatagacatttaatgtattaagttaataataaggggggcagccatgagtcgtaaagaaccaatttatcaaaccattttaagcgccttgattctggaattgaacacgaaccattttcgaaagaatgatccgttttatagtgagagtgagctacggaagaagtatcaagtcagttccacgacagtcgtgcgggtactgaatatgttagccgatcagggttatatctatcgtattcagggtaagggcagctttgtttccaaatttaatcgggggactgcggtacgaattacggatacccatacatacgatgttgatgaggaacaggttgcaatcttagtggccaatcagacgacgccactaccaacacgggctaagtttacggctgaatcgacaacctggtatttagagcgattacgcgaaattagacacgcaccatttgaattttcgcagtcgtggtatttggcgacgctgattcctgccacagcaatgaagaagttacgggccgtacattcgatttatgcactaattaggaaacatgcgcagcttgatttatcacgccagccctttgagcaagaatatgcggcgacctgcgttcctaatcaacgaattgcggattatttgcacgtgagtctggatacgatggtgattaagatcgaacggtgggtatttcaaggggaagaaacgctggaatataccgttagttacatgttgcctaactattttgggctggcgctaactagtgattccaagtcggtagatcctaaccgaattcgatgatcgatgcataaagagaggagtggcacacaatgtcaattcatagcaataacttttattccaacgtgttacgacagtcagtgcaagtccaagttatcttgccggaaccagtgaacgcggtcggacaaattttaccagactacagtagtggtgaacagcaacttccaactgtgtggctgttgcatggcttaggtggggacgcaacgtcgtggttacggcgaacggaaatcgaactactggcaacgcaataccgagtagcggtcgtcatgccggaaacggggcggggattttatacgaatatggtccatggtccacgctattgggattacttgacccacgagttaccaacacgaatgcgttatatctttccgttgtcggcacgaccggaagacaattatttgttggggaactccatgggtggctatggggcattacgttatgcctttacctatccgcagcggtttgcggctgtcgcggcactatcaccggtgacggatctcaaaaggtttcacgtggaacaatcggcaattatgccagaccttgagctggctttctcaccagcacagatgcaagggacgccagcggacttgtcttacttggtacagcaaccgacaaactgggggacgttacgtgttctaatggcgacgggtgatcaagatatgttacggtcaatggatgaagccttcaagccagagttggcggctgtgtttaaagaccagtttgaatggcagttacaaccgggtcaccatgattggcggctctggaatcatcaattaccatttgcgatgcactggttaattaagggaggttggcgcaatgtttaatgttaaagatgagcacggccactataatttgtggcggcagacgggattagctttattaccgctattattggcaattatcgcatatccattgctacctaatcgtgtctacgtgccaaccgctgtcaccagtctgacgccgtggggaatcaagagcaatatcttcatttatcccgtcttttgcctgattctgtggttctttatctggctatttatcttcttcaaccggttatatgaaaaaaatttcaaggtaacccgccaaaaatatcggccaatggagaactactatgtgtggagcagctgggtgttggatattctggcgactttgatggtggtggttcagatcttggtgagtgttagtcggtgagtggtttgttaggtgtgaagttggcactatgagattaacgatattattgaatagtaaaatggctacagattgagcaatcaagttcctcaatctatagccattttactaatttttatgctgttttacatagaaaacttgcgatttcgaatcatcaaaatgataacgattacaagactgagtagtgtcacgccagtatcgatttcgaaaacatgtagaacactgacagctgtgtcatcaatgatgaagctagagactaatggacctacaaagaatgtcagtgcagtagcaaaactatagtagccagtcaccttacctttctcagctggaaagtattggcttagtaaagttaatcctaattgccaaatacctccggctgcgaagaagccaattgcaatggcagttaaccgagcaccgtcagcactagggataaccaccatttggagtaatgctaggaacgaaatcagagtgtaagcaaagatcaacttgattggcttaatgcgagttactaatgaggaggtaataaaaacggatactagtgaggccattgcataccatgaaattagtgatttagagctgtttagccccaactttaagacgctactaccgaagtttggtgcgtattgagagaaaatgtaaaacgtaaatgaaagtgtaaaaccaacaattattagcaaactaccatcaattaacatagaaggctgattgccactaggattaatggttgttttaggctcgtcgctaattttagtgtgtttttgagttaatgtttgtggtgcgaagctggcaagtccaattaagatgatatctaaaaccatcacaactaccatgacgactagtgtgatttgagcgtttggctgagcagcaacaatgaacggcaggacgaattgtgcaagagacatggccgcttttactaacgaattcatgctagcagcttgctcttggaaagcatctgtcagtgctggataactagctgtatcaccaaaggaattggttgcgcccataaagagtgcagcgatgcaagcactgatgagattagtactaaagaacaggcccataagaaatagaatttgtgcaaccataccgattaacatagttcccttacgccccaagcgatcagaaagataacccgcaatgagaattgtcaataagcggccaattccaatcattgcaatgacagttgagagccctttaacatcagtgtgccatggtgcttggaattgagtcccgtattgagacacaataatagtagccattcctaaaatagcataatttaaataaattccggcagctaatggtaaatatgtcttatgtttcatggttatatcctgcttttctttaagttccatagtatcacccaccaattcttattttcacaaagtgtgcatttttaaacgttataagcaacaaaaatggcatttttaatatccaatataaatgttgaaaaatcaatcaagtaaacggtttataattattaatatttttaattgatactaaattcacaatcgttgattcacttcaaattttaacacggtctcgagaagtgtctaataacaaaatcgcattcaatcgatagctagaagctattaatcgaatgcgattttattggttcagagttaaatattgttaacagagagtgttttgctttgatcacgaacgaaggtgatgaactcttcaacagcgggttgaggtgtacggtgcttaagggtacccatgtacaaaattcgttgccatgttggaaatgacaatggaataatcttgactggcatggtttgaagaatagacatattaggtacaacggcaattccaaaaccgctggccactaaaccggcgatggcctgatcttcttctacggcatatgcactaatgggttgaccgccacagtcgttaaatagtttttgcataattggatgaagtccactgcgttgcgaaaaagtgatttggggataggctaatgtttctgccaaattgatactggagcggtttgccagtgggtgtgtagttggtgtgatgcaaaccatagtttgttcagcgacgggaaaaaactcgatatcgctaaagtgatccatctttgagcaaaaagcaacatcatatttgttgttacgtaaaccgttcagaatatctggggacaggccagtatcagtgttgaattgaaattggacagcggcatgggggcttagttgaagaaaacgctgggcaatatctggcaaccacttaatacttagtgttcggagtgcggattcgacatcactagcgaaaaccttaccagcaggagttaaagtaacactacgtccggctttttgaaagagatcaatgttcaattctgcttctaaggagtgtatggctttagttaaacttggttgtgtaatatgtaacagcttggcagtttgtgtatagttttcagttcttgataatgcgacgaagtatcgtaaatgatccaaattcatgatagaaataacctcccgaagttcattctgacgggtaacgattgatactcaaaagttaacaactacggttaatataacagaattaataacttttggctatggatagccccaactaaaagcaattggacgagtcgagtgatagcgattacatttaacttgtaaaataaattatgtgaatcacaaaacatgcatgtgtcgaatccactatttggaggaaattattatgacaaaatcacatccaattacaattagttcctggacacttggtgatcaatgtacatttgaagatcgttgcaaagcggctagtgctgctggttacgatggcattgggttacgcgctgaaacttacgtggatgccttgaacgaaggtttaacggacgatgatattctcgctattttggataagtataatattcgttgcaccgaagtcgaatatattgttcagtggtgtgaagcaacgcgcacatacgaacaaaaatataaggaacaggcttgcttccatatgtgtgaattatttggtgtaaagcatattaataccggattgatggaagattatgatattgactatacagcaaagaagttacaagaattagcagcccgggcgggtgatttaattattgcattggaaccaatgccttacagtggcttacctaacttggacaagacttggaagattatgcaaaaagccaactgtgacaatgtatatatgttactagatatgtggcattgggtacgagccaaccaaccatatgacttgttgaccgaggaacaagcaaagcgggttatttcaattcaaattgatgatgcatatactcggccatatgctgattctatcttacgggatgaatcaatgcatgatcggttggctccaggtgctggtgatttggataccgctgggtttgtcaagatgataaaagatgcaggtgttgatcctaaggtgattggtgtcgaagtaatctctgatcaatacatggctaagggtattgattacgttgcggattacacctataagcagactgtgtctgttttaaaggaagcgtggcctgaaattttaaaagacccagttcaagcttagatatttgattataaggagtgattattaatgaataataattggttaggattaacggataaagttgttgcaattacgggtgctgttggtggtatgggtaccaagttctgtgaagagtttgctaagcagggtgccaaaattgtcttgattgatatgattgcggataaaaccgaagcgtacgcaaagaaattgacagaaaagtatggcgttgaaacgttggccgttaagtgcaatacgactaacgaagaggaagttgatgctgctgttaaggccgtgactgataagtttggtgaagtcgatgtgctagttaatacggctgctattttacgcttctcaccacttgaagacttgcgtttggatgaatggcaagctgccttgaatgttaacttaacgggttacttcttaatgtcacaacggtttggtcgcgtcatgattcaacagaaacatggtgcgatggtacacatctcaaccgtagcgtcacgttatcctgaaacatatagtggggcctatagtacaactaaagcagcggttaatatgatgtctaagcaaatggctgctgaatggggacagtatggtgttcggagtaactgtgtcttaccttgtctggttaagacgccgttatctgagaacttttacagtgatcctaaagttgaagagggccgtgagcggttagtggctagtcgccgcattgggactttggatgatattgctaatacggtcttattcatggctagtgaccgttctgactacactaatggtggtgaagtgaccgttgatggtggtttgaatatgatgatttctgacatgattccaaagccaggtggtcgtcgtcaatacgcgattgatcatcatcaaccagcgaaaaaatagaaattaattcagttacatgaactcgtggatgagactgggacgactgtctcggtctctttctttattaattaagaggagataacaattatggaaaaacgaatttcaggtaccactggtttatttaccttactcggctctccagtaggtcattcaggttcaccggcaatgtataactttagctttcaagagcaaggattagactatgcatatttagcttttgatgttaaaaaagcacaaatgccagaagcgattgatgcattacgattatttaaggttcgcggtagcaacgtaacgatgccatgtaagggcgttgccgcaacacttgttgatgagttgtcaccggccgcaaagattgtgggggctattaatgtcattgttaacgataatggtaagttgacaggtcatattacggatggcattggttttgtacgcaatctgaaagagaacggtgtagatattgctggtaaaaagctagtcgtgattggtgctggtggtgctgctacggcgctacaagttcaatgtgcattagatggtgctaaatcattggctatttttaaccgtgaggacgacttttatgcgaatgccgaaaacactcaaaagaagattaaggaagcaaagccagaagtcgacgttaacgtctatcatctagaagaccaagacaagttaaaagctgagattgagaaggctgatattctggttaacgctactattgttggtatgaagccgctggacggtcaatcattagtcgatccaagctatttacgttcagacttggttgttgcggatactgtttacaaccccctaaagaccaagttaattgaagacgccgaggcattaggatgcacggtagcgccggggaaaggcatgttattgtggcaaggtgatgcagcatacacactctttacaggtaaggctatgccaacggccgaatatcaagcctacgaggcacgtcaagcagctaagcagcattagaaaggggcaataaaaagatggaagcacgaattgatggacacacaactatgctaggccttttcggctcgccggttggccattcaggcccaccagcaatgtataactacagttttgaaaaggcaggtattaatgatgcatacctggcttttgacattcaggctgatgaaatggccagtgcgttaactaaaatgcgcgttttaaatatgcgtggtgctaacgtaacgatgccttgtaaaaaggttgctgcagaattagttgatgaattgtcaccagctgcagaattaatcggtgctgtgaatacgattgtcaataatgatggcgtgttagttggtcataatacggacggtgcgggctatgttgaaaatctacgccagcatggtgttgacccacagggaaagcgccttacggtgttaggtgctggtggtgctgctacagcaattgccgttcaaatggcactagatggcgctcaggcgattcatatctttaatcctaaggactcgttttatcaaaatgctgagttaacggctcaaaagatcatggataaagttcccgcatgccaagttactgtaggcgatattaatgaccaggaagtcttgacacaagcaattgcacaaagtgatattttggctaacgcaaccaaggccggtatggcaccgaatgttgaacaaactaatattaaggatatgaccgtttttcgttctgatttagttgtgacagatactgtttataatcctgttaccacaaaaatgttagcagatgcagctgaacatggaagcaaaacaattggcggtaaggggatgctggtttggcaaggtgccgcagcgttcaaattgtacacaggccaagaaatgcccgttgaagaagtaacgcaacggttcttctcagatgatgggggacgttaagatgacaagtaacacaaattcaaaccgtaaatattatgtaacagcattggcattgtactttgcttactttattttaggaattgcctcttcaataatgggacagtataaaactgagtttgcaaaggcgtggggcgcatccacgctggctaacggaaccattgatgttagtatggtagtttctgtcattgctgcctatggtctgggacggctgattgcttacccatttgctggtccagtctctgataggattgggcgtcgtatcagtggtttcattggaattgcgttgtacgccgtattcttttttgggatgatcacagttcacagcatgtggtgggcgtatgctattggtattattaacgggattgctaattcgttcttggatacctgtgtgtcaccaagtgtgatggaaatctttcctaaatcggcctcaattgcaaatctatttacaaagtttgccataacggttgctcagtttgtattgccgttcgttattggtttggttgctagtgctcaaatgtcatatcgagtcatttttatcgggtgtggaattttaatgattgctgatgcaatcttagttctggttttaccatttcctaagcaagataaagcaactgctgaggctaaaacgactactgacaaaccgaagcatcgtttcacaccagctgcgattgcatcaattttaattggttttactagttcagcgacgtttatgatttggttgaattgcaatcaagagctaggagctagttacggaatcaaagaccccagtatcctgcaatcattttatgcggttggtgcaacggtagcggtcttattaactgctcagtttatccatatggggctgaaagagacgaccgtattagtactatatccaagtatttcaatcgtcatgttaatgttatgttatttcattaataatccagtcattctctatattggtagttttgttattggttacgctgctgctggtggggtactacaattggcgacctctacgaccattggtttctttccagatagtaaaggtctagcgacatcccttgtaatgattgcctcaagcgtggctaattatgctgtattatcagctgcggcatacttgacaaaagttaccggtgctgatgcgccacggatgataattctaatgaacattgtgattacgttaattggggttggtttagcattgattgtgaaacatggtggtcggtcaacacgtacgtcggctgcttccggtgttgaaagttaattaaaaattgcgccttcaataaaggcgcaatttttagattgatcgttcttgattagtgtaatgttgccaacaataactgcgaataaactcttggaaacggtggacggcaggtgtaataaaaccactgcgacgaacgactaagtaaatttgatgttgtaatggctgatcagctaagtgtttgatttgaacacgctcgggatttaaaagtggtaagtagggcattaacgcaacacccatattgtaacgaacaaacccagccatagtatgatcttcttctacttcataagctaccttgggctgaacgtgggctgctgataggatttggtcgattaatggtcgcaagccgctattctgtgaaaataagatcattggataaggtgctaggtcttcaacgtgtagcggatttttttgtaccgcgggatgatcatttggaacaactgcaacaatttcttgttgaactagtgggataaagtcaaagagatgggcagttagctgctcacccagtctatcgacgttagaggctagaacgatgtcgtatttttcatcggctagtgcttgcaggagcacaccggagtttccttgaccaagctcaaaagtaattgcttgattttcgctttgatttttgaaatgggacagtaactcaggaactagttgttgtccaagggtgtaggtaaatcctaatttaacatgaccggtatctggatccataagttgtttgacgagttcgttgccttgtgataaatcatttaaagtagcagtgacgtatttcaaataaacaccgccaattgatgttaacttgatattacggccatctgcttcaaaaagtggaacacccaattcgtgttcgagttttttgatggcataactcaacgaaggctgtgagatacctaagttttcggcagcctttgccatatgttgtgttcgagctagctctttgaaaaaaactaaatgtcttaaattcatgaggaatgctcctttactcatagataactttgatgatttaaacaactcatccatatttattatattaaactaatttgctaacataacaagtgaattgagtaacaaacagataaaaataatatttaggagtggtttttcatggcagaacgaattgatgggcatactttactgattggtttaatggcgtatccaattcgtcattcaatgtccccaactatgcataacaatgcttttgctaaattaggactaaattacgcttacttagcatttgaagtgacgaatgaaacgctgccaagtgcaattgagtcaatcagaacacttgatatgcgtggctccaatatttcaatgccaaacaagcaaaaagtgattccattgcttgataagcttgatccagcagctaaaatgatgggtgcggttaatacaattgttaatgatgatggtgttttaacaggttatacgactgatggcatcggatttatgaaagcgctcgtggatgaaggcttggatattcgcgaacataaaatgacgctagctggtgctggtggtgccgggactgcgatcgcagtgcaggctgcattggatggtgtcaaagaaatatctatttttaatatgcacgatgcaacatgggcaaatgccgaacggaacgttaaactaattaatgagcagaccgactgtcacgccactttacactcattagaagatcgtgatgatttcaaacgggaaatccaaagctcttatatctatactgattcgacaggtgttggaatgaaaccacttgaagataagacgcttgtggacgatcctagttggttcagctcagaccaaattgtgtttgatacagtatatgcaccacgaacgactaaattaatgaaggtagctcgtcaagcaggattgaagcatgtttacaatggtttaggtatgatgcttgaacaaggtgcagcagcctttaagctgtggactggcgaagacatgccagttgattacattcatcagattctgtttagtgatgatcaggataaataattgatgacaggaggcaagttaagatgcaaccagcgataaagctacgaaatattgaacttggtagtggtcgacctaagttggcagtgcctatcacaggaacgacgattaatgatattttagcagcgacgacaccgattttagctgcacagccagatgtcgttgaatggcgaattgattttttcaaggatgtaattaatccagaaaagttgaaatcggccggtcagcaacttcgtcaggctttaggtgatattgccttattaactactttccgaactaaaggtgaaggcggcgaattagcactatcagatactgagtattttaaactgtgtgagacggtcttagatggtgggttcacggatgccttagatgttgagcgttaccatgacgaacaagctgttaaacaaattgttgcagcagctcatgagcatcaagtagttgtgatcatgagtaatcatgattttgataaaacgccggcggttgctgagatcgttaagcgccttactagtatggtcgattatggtgctgacgttgctaagatggctgtgatgccacaatcggtggaggatgtcttaacattactgacagcgactaatattgcacgccaaacactaccacagccagtaatcacaatgtcgatgggtgacttaggaaaagtgtcacggcttgctggtgaagtgttcggctcttgtttatcatttgcaacggtcggggcggcttcggcacctgggcaaattgcacttgaaaatttacggccggaattggaagatctgaagttaaattaaagcataactgaaagaaatcgtgaggtcagagtgatgattgggacacaaaaaaagtatgtttcacaatttacgatgatgggaaccgtcatctcgctgacattatttgagccgaatcagttagcggtcgaagcggtctatgattacttgcagcggatggatggtgtcttttctgtcaatcgtgccgattcagaattagctgcgatcagtcaatatgccggtattcatccagttttggttagcactgaatgctttcaactagtgtcggatgctattaagtacacaaagcaatatgcggatagttttaatgtgctaattggaccgttggttaaactttggaagattggttttggtgggcatcaagtaccagcggccaagggaattagccaacgattagccttattagatacgcacgaagttatcctagatgaagcccaatcgagtatctacttgcgtcaatctggcatgcaattagatcttggtgcgattgccaaggggtattttgccgatcaggtcgttaagcagttacagcaggctggcattaccagcgctattgttaatcttggtggtaacgttaagctattaggggccaatccgctaaccgataatcggcgttggcaagttggaattcaagcacccgaagcgccacgtggctatccagcgctacaggttgaaacgcctgctagaacggtagtgacgtcaggtatcttcgaacgatattttaaaattggcaatcaccgctaccaccatatccttgatccgcgaactggttatccggttgaaaatcaagttgatcaggtgtcgattataactgaacggtcagaattagctgaagtgttatcaacggtggcctactttgaagggccaaaccgtggttgtcaactaatcgaacagttgccacatacggaagcaatttttattgatcatgaacaacaggtaacagttaccagtggcttaacgccgcgacgcaaaggagtgtttactattgagtaaaaaacaaattaccggccaagcaatgggccacaacggtattatcaattatgaagttgacgtgcaagataataagattgaggatttgaaaatattaaagcattccgaaacgtcggggatctttaaccaagtcattgataaattgaaacaaaatatcattacggaacaatcattcaatgttgacacaattagtggtgcaacggtgatgacccaagcgttacttaagtcggcagataaggctgtaaccgatgctggtgttgatgtgcagccagttcctaagaaaaaagcccccaagacgcaaaacttgcggaccgacgtgctcattattggtggcggagaagcgggcttagtcgctggctgtcgagcgttgacaatgggtcagaaggttatcttagttgaaaagaacggctatcttggtggtgcgacgattctgaatggttctaacgttgttggtaccgggtctgatgttgctgcgcaaatttttgataataatcatgatacgccagaaatgttggcacaagatgttgctcgtgaaagcttggagacgaactatccagctttgaccgacctaatggtgcataacattggtccagccattgattttattagtaagtttgcagatttacattatcaaaaagcacagacgcaaacgccagaacattcgattaaccgtcagattgaactaccttcagcaagtagctatgaattcattcaaaaagtttcgaaggcgtttgctgctgcgggtggtcaaattatgttggatactcgagtcgagaagcttatgttggacaacgataaaaagttacgcggtgtgattgctgctcaaaaggaccaaacagtcaacatcaaggcacgttcagttgtgcttgctgcaggtggtcatggcgctaaccaaaagatgcgtggtactgaaagcgaaggcattgattattatggcccaatgacttccactggggatgcctatcaatttaatggtgatttggatttgcaaacgcacgatttaggttggtacaagctgtatccacatggtgttgaagtggaaccaggcgttgctaaattgaccacgtacgcgtcgaaacaagcaactgatatgggtgcaatttacgttaactctaagggtgatcgaatcgttaacgaatcaaatgtttatacgacttttcggaatgccatccttaaacaagcggataaagttgcttacctagtaatggatgaacggacttggaagaaagtttacgacctactgatcctgcatgatttcacaccagaagaaattaagagcttctttgagaataagggtaaacggccagtatttgttaagggttctttggaaagtgctgctgagcaggccggaattgtggttgatgaattagtccaaacggtcaaaaattatcaaggctatgttcaagatggtcacgatcatgatttcggtcgtgatccgaagtacttgcaccaatttgaaggtgaaacattctacatcattgaacaacgtgatcgctttgcgacgactttaggtggctatagtgttgatgctgataacttgcaattggtaacgactaaaaatgcaccggtagctaattactttggtgcgggggaaatcatcggcggcgctaacggacatgattcaatgccaagtatgatgaatacttgggggatttcgtcgggttacgttgccggcgccgcggctagcgaaaacgctcagcggcaggcaaccgcgggcgatgacgaagccaatattgtggctattgtggggactaacgcttcaaaatcatataaccgtaagttgttgtatgccatgaaagaattatttgaaacgcaagttaattttgaaatttgtgaaattaaagatttaccgctattcaatgaagatgatatggattgggaaccggcaagtgtaaaagcgttagccgctaagattgaagccgctgatggtgtcgtctttggcgtgccagaatacgatcattcgattccagctgccttgaagagtgccattgaatggctgtcctgtgcagaacatccattcaaagacaaaccagtgatgattgttgggacttcgttaggtattcaaggtacggtacgtgctcagatgaacttacgacagattttggactcacccggtgtggatgccaaagttatgcctggtaacgagttcatgttacctcaagccggcaataagtttgatgagaacgatcatctgaatgatgacggtagtgaacacttcttgaagcagtgctttgggcactttttagaggggcttgaattagcatctaagaagacagtgacgaattaactactatctagactaaaagaacgtacacaactcgtgtacgttcttttagtctagattttagttgttaaatcttttgttccacatcgtcgattgtgacaaccagggtcgcgcgaatccaatcaaacttagtatgcatttgatcgaaataagcgccactagtttcaaacttgccggtaccatgaatgtggaaaccacagccagtaccagttgtgccgggaaccttgtaactaccgacagcaattgtaatgtggttgtcggtagcaaaatcggcctcaattgagtgcatgccagccgatgggatcaatagggtatgatcatcgataagttgcatataatgactccaggtgttgacgacgtgtgctggtgcggcgttgaccgtaacgatggttgcgggggtcgtgtctttgataacttcaataaatttagggtccataataagtactcctttacgtttatattctcataatatattgtaattgatatatataaattatcaagcgagagtgttcgatgtctcaataatcttagcggaggtagcatggtaaaaccaggcgttgctttttactaatgaaagcggtaactttaactaggaacgaataacgagagggtgtttaatatgtatcaagcaagccagaagcgctatgaccatatgatttataatcgagtaggcaatagtggtttgaagctgtcagcaatcgggctaggtctttggaataattttggaagcgttgatccgatcgctaatcaaaaggcaatcattcatcaagcttttgatttgggaattacctactacgacttagccaataactatggcccggagcccggcagtgcagaaactaattttggtcgtattatggctaccgatatgcggccataccgtgacgaaatggtcattgctagtaaagcgggctatgtgatgtggccgggaccatacggcaattgggggtcacgaaaaagtattattgccagtgctgatcagagtctgcagcgaactggtttagactactttgatattttttatagtcaccgtcctgatcctgaaacaccaatggaggagacggccactgcgcttgatcagctagtacggcagggtaagacattgtatgtaggcatttcaaattataatggcaagcagacggctgctatgaccaagatatttgaatcattaggaaccccatacattattcaccaaccacgctataatatgtttaatcgacaggtggaacaggacttgttccccgttctacaagcaactcataaggcggcggttggctttagctcactatcacaggggttattgacggacaagtatctgcacggaatcacgacagattcacgggccaataagcaaacaattccatttttgagtccagtccaggtagaacagacactagctacggtaaagcgcttaaatgaagtcgcgcaacaacgggagcaaagcttagctcaaatggctttggcttggaacctacgtcagccagccttagcaagtgtcttgattggtgctagccggccagagcaggtggttaataacgttgctgcattggaaaagttgaaatttagtgaatcagaattagcaacgattgaacagattcttaccgaacaaccggcaattgattggaatgctggtcgatcatagcgtttgcacaattcgctatagtcaatgttatagagccgcaaaagaaagggccatatccgaggatatggccctttctgtacctaatagttaagttaataataacataattttgcagatttgcacgcacaggggggcctttactaaataaattagtgtttaaattcgccaattttcacaattaatgataaagttttacatgatagttatcacgattatgcgttgaagttcggcgcaatacttgaaaattaaaataatttgcaaataaatcatgcgatagcgactttagatggtagtaagaattagtttgaatttaagggggccaattcatggcggcgacgctaaaagatattgcaaataaagttggcgtatcattggcaactgtatcgcgcgtgttaaacaaagatcagtcattgtctgttagtgatacaacgcgccaacgaattctagatgcagcagaagcattacagtattcaaaaaataaacggcatactgtcacgacggcgcgtaagcgacttgctattgttcaatggtattcggaatctaaggaacaagatgatttgtattatatgtcagtccggatggggattgaacgtcgtggacaagataatcagtttgaagtgactcggatcttccaaaataatttacaagaattgggaccagacgtagatgcagtgattgcagttggaaagttcagcgagccacaagtcaaggacttggcatcagtaactgacaacttagtattcgtagatgatgatcagtttgatgctggttttgatagtgtcattactgattttcggttggccacagaaaaagttgtcgattatttttggcaacgcaactttcatcatattggctttattcacggtcaagaaatgacaaccgaccatcagttagcggtagttgatcgacgcatgctaggttttcgggccgcgatggaacgacggcatgcgtttgatcctaagttcgtttttaagggcgattatactagtgaatctgggtttaaaatgatgcaaaaagccattcgtaagttgggagatcaactaccaggagccttttttgtggcaaatgatccgatggcggcaggtgcgcttaaagcgttgcaagctagtggcatccaggtgccagaacgagtgaagctatttagctttaacaatacttcgctggcgacattcgtttatcccgaattaagcgcagttaacgtagatactgagttaatgggggcgaccgcagttaatttggtcatcagtcgactagcagggcgaacaacgacacaacgggttgagctgggtactaatctggttgagcgagcaagttccaagtagtgaagggcgatctgggatagaaaccagatcgttcttttagtattttaactaaaagttttactcaacttcaagaaattctggtatacttctaaatgaaagcggtttaaataacacggaggtgcatgattttggaaactaaaaaaacggtgtttgaccaactagatggtcaagatgtaatgcgttatacgctggtcaatgaccatcaaactcgtatctcggtccttagttatggtgggacgtggcaagaattcgtcgtcaatgaagacggcgttgaacatcccttgatttggggccttgataacatgactgactatcaacgagtgggatactgcctatgtcaatcaattggtcgggttgctggccggattggcggcgctaagttcaaaatcgatgatcaatcctatcaagttgatatgaacgaacaaacccattcgctacacggcgggaatcatggttttaacacgctgaactttgaaggtgcttttagccaaaccaatgatagtgtcagtgtgactttgaagaagcatatcaacgccagtgatgataattacccgggaaatatggatgtcgctatcaagtttacattagataatcaggatcaagtatccattgcatttaccggtgatactgatgcagcaaccctctttaatccaactaatcacgtttattggaacacaactgatgatcggaccagtttggcccaacaaaaattacagattacgagtgcagctcacttggaatttgatgatgaaaaagtcccaactggtaagaaattagcagttaaaggcacagcgtatgactttaaccaggcacaaccagttgaaaaggcattagaccagctgaagactgagaatggtggcattgaatttgacgatgcgtatgaagttgccccaagtgcggcagaaccaattgctatcgttggggatactgatgataagcgccaagtaaaaatttattcagatcgcaatagtcttattatcttcacggctaatccgtttgatgctgataaggaagacgcgcatcaatataatgcgttagcgacggaagcccagacacttcctgatgcaatcaatcatccagattttggtgatattgtgttacgtccaggagcaccagtgacgcatacgattcggtaccaatatgaacggttaaattaatactagttgaggtgtcaggcgagttctgcctggcgccttttttgtaaacgtatgagtaaacaatgtttaatttagttaacaaagtcccgagcatctgattaataccgtgattagtaaaacgatgatcattggtaagataatgagtactatactgcttaagcccttggaaagcgggcaatcagtgtcgataggcgcattagcaggtcctaatcaaaagcggtatagataaaacttttgaacaaattttactaaaaatcattgacattacttctgaaaacgattacatttaaacttgtaaattattcaaggaagatgtgaggcgagattatggatgcagagacaaagcagagtaaaggtcgtaaaataacatcgcgacttgcttattcgtttggggcgtttgggcacgatgccttctatgccactttatcaacttattttattatgtttgtgacctcccacttgttcgataagagtagtggggctcaaggaacacaaatgattgcttggatcaccatgattattgcaggtttgcggttcgtggaactagcaattgatcctttgatcgggaatgccattgataatactaattctcggtggggccactttaaaccatggattgtcattggtgggattataggttccgtcgttttagcacttttattcacgagtttaggcggattaaatacctcaaaccccattctatatttaattatttttgcaattttatacattacaatggatattttctattcgtttaaagatgttggtttttggtcaatgattccagcaatctcatttgactcagcagaacgtgaaaagacggcgacatacgcccgggttggctctaacattggtgccaacatcgttggggttatcgttatgccaatcgtcttaatgttttctgttaagtctaacagtggtcaaggtgacaaccgtggttggatggcatttgggatcattattgccgcaatcgctttgatttctgccttagttgttgcacttggaaccaaagaaaatgattctgaattgcgtaagaacactgaaaagactagcttcaaggaagtcttcaaagtgttagcccgtaacgatcaattgatgtggttatcattgatgtatgggatctacacggcagggattgccattacgaactcactagaactttactacttcacctatattttgggtgacgcctcgaagtttacactattaggttcgctaaatgcgattattgggatttttgccgtattggccttcccaccattagcaaagaagtttagtcgtcgtaaagtgttcttcttagcagttgttattatgatgatttcactgatcatgtttgcctttgctggtcagtcattaccaatgatcttaacagcggccgtattattctacattccacaaccattaattttcttagttgttttgatggttttgagtgattctgttgaatatgggcagttgaagtttggtcatcgtgacgaatctttaaccttatccgttcggcctttacttgataaattaggcggtgcgatttctaacggtgtcgttggtttaactgctgtttgggctgggatgacagctggtgccactgctggtgatgtgactagccatggcgctgccatcttcaagttaatgatgttcggtgtacctgctgctatgattttgattgggacattcatcttcttcaagaaggttaagttggatgaaaagatgcatgcacaaatcgttgatgaacttgaaaaaacatggtcaactcacttggaaaccgatgaaactcctgctgaagttgaagcagaagccgatgccaagacgacggtttatcaagatcctgttgccggggaactgatcagtttgaaagatgttgctgacgaatccttcgcaaacggtagtatgggtaaaggtttcgccattaaaccaacggatggtcgcgttgtcgcaccatttgatggtgaagttgttgcaaccttcccgactcgccatgcaatcggattacgttctgataccggtattttaacgctaattcatattgggattggtaccgttaagatgcgtgggactggatttgttcagtacgttgagaagggcgaccatgtcacacaagggcaagaattaattgaattctggcaaccagcaattgaaaaggctggcttggatgataccgttatggtcgttattacaaactataaagatatgcccgaatttacgtatcttaaagattcaggaaccaccgtacaagatgatgaagatgtcttacaattatcgaatgtcggcttaccggatcaagcatagtttctttacgaggagagctattaatgacgcgagccattaatagctctttttgtgaactgaaatagaaaaagctaatagcgaagggaagattttactatggcagtaacgttgcagcaaactttaattgacattgatgaagaacaacttgtctttcacctgcataacgatcaaatctcgtatattctaggtgtggagacaggcaacgtgttggcccacttgtactttggcccacgggttcggggttatcatggcgagcgtcagtatccccggattgatcgggggttctcaggaaatttaccgaatacgactgatcgaagctattccaaggatgatttgccacaggaatacggtggcaataataccggtgattatcggcaacccgccgcgattattcgcgcggccaatggtgctcgaacagttgattttcgttatcaagactgccggatggaagccggtaagccggaacttaagggcttgccacaaacttatgtcgaagatgaggatgaagcccaaactttgattgtgacgttgcgagatgccacattaggcgtgacactcgaattagcctacacgatttatcgggatcggccagttatcacgcgtagcgcccggttgattaatcacagtgagcaagctgtcgacttagaaaaagtggcttcgatgcagatggacctgccaacccaaccattagatgccatttcgttacctggaagctatgcgcgtgagcgccagcttagtcgtgaacggctccatcgaggtgtaactcagtttgaaagtcgccggggtgctagttctcatcatatgaatccttttgtggcgctagctgatccgaatactaatgaatttcaaggcaatgtccttggtgcattgctaatttattcaggtaaccaccagattagtttagaacgggacccaattggtcagacacgcttgactatgggaatcaatgaatataacttcgactggcgattggcggccggtgatagtttccaaacgcccgaggttgcaatggtatactcgacgacggggcttaatggtatgtcgcaaacctaccatgatttattgcgtgatcgcgtggcgcgcagtcgttacaagcacgatctccggccgatcttgatcaacaattgggaagccacttactttgactttgatgcggacaagattcaatcaatcttggatgctgcagcaccactgggtatcgaaatgtttgtgctggatgacggttggttcggtcatcgaaatgatgataatagttcgctaggtgactggtttgttaatcggaacaagttaccaggaggcttagcggatattagcaaacggacccatgataaagggatgcggttcggactttggttcgagccagaaaatatttcagccgattccgatctttatcgggcccatcctgattgggtgttaggcgtaccagatcgtggccgaacgttatcgcggaacgaatacgtgcttgatttcagccagccggatgttgtcgacaatatttttgaacaaatgaccgcagttcttgataaggtgcccattgattatatcaagtgggatatgaaccgcaatttaacggaagtctattcgccacatagcgattcaactcatgaaggtgagactagccaccgctttatcttaggtgtatatgacttgatggagcgtttaacaaaacgctatccacagatcttatttgaaggctgctctggcggtggtggccgcttcgatgctggtttaatgtattatatgccacagagttggccatcagataataatgacccgattgaacggctcaaaattcaatatgggacttcactcgtttatccaatttctgcaattaccgcccatgttgggacgagcccggatgaattgttaggacggtcgacgtcgatgaagatgcgtggtgctgtggcaatgagtggtaccttgggctatgaactggacgcggcccaactaagtgatgcggacaagcaggccgttaaaagacaggttgccttctataagcagcaccgtgagttagttcaatacgggaccttttatcgattagagagcccgtttgaatctaatacggtggcgtggatgtttgttagtccggatcagaaagaagccttgctgttcaccttcgttattttaggtgcagttcaaccagaaccgcatattacgaagttagcgggattagaccctcagcagacctacgttgagaccgacacaaacaaaatgtacggtggcgatgaattgatgcaactaggactctacacgactcccgttcaaactagtgactttacggcgcaggtacattacttcaaggctaaggactaagctcagccattaaacatattaaaacttaatcatcgttaatctaaaagaacgctctggcaaataactcgccggagcgttcttttgaaatcaaaataacttttagaaatgaatattaaagctgaagtcaatgtcttgatcagcggggatatgatatggggattctacgtctgttccccaactatcaatgccaccgaccccacgaacggcaccgtagattgataagaccgttcgccgtgctaatggtaattcttccatgtgcgttgcgttttctagttcagcggcggtatagggaaggcagctgaaggcgaatggtgcatcggcttggctaaatgtcaaactgaacggtgtgttgtcgtggtcagcgttattttgtgttgttgatcgcgttactgtcacttgttcagtttgcatgtgcatgccgcattcttgtgggaccaagtatggtgtgactggcagactgtcaacgtggaatcgcccgtgcgttgcgccggccagccggtcaggataagtctcaccggacaaaccggtatagtcgaagccggtcgcggtagttggtatgataaaccgcagaccaaatgcgggtagctctggcaaatcagactgaccgctataatgggtggcgatattgatctgaccgtctgctgtcaccgtataagtcactgtgacgatggtactaggaacggtcgtggtaacgaagtggtaagccagtgagactttcgtggcgatttcgtgatccgtgtatttgttattgagtggcgcgattggtaacggtgtgactggttggtcgtcaaccgtcaattcgatatcttgacaagttgagaacttatcggccgcgtaccactgtgcggatttgactgaaaagccgctaccgtgatcattatcggttgtcgcccgccaaaagatgggcgtgggtgtacgatagagccattctttatcgttgacgacgagtgattcaagtccgccacgttcgtagctaaagaggtagtggaaattagccccctgtagtcctaaactcccgtcgccgtaaataacgtgtagttgattatttgtgtaagccataataatatttcacctcttgcattgctggttttggcgtccggtcagcaaacattaagccgtcaccggagaattcataatcggagtggcgttcgtcgaaatcaccgccataccggagcacatcttggtcggtaattgggtcatgaacgaagagggcttgatcaataaagtcccaaataaagccaccttgatacatcggatacttgtcgatcaaatcattatatgattgcataccgcccagagaattccccatgtcatgcatatattcacaatctaggaaaggtttggttgggttatcttccaagtaagctacaatattttggggtttttcgtacatccgactttcaacatcagaaatgcgatcttttaattctggtgtgtggacaacaccttcgtagtggacgagtcgtgaatcatcgtgttctttataaaaagcctgcatcgccgcgatatcttcgccagcatacgattcattgccaagtgaccaaaaaatgatcgatgggtggtttttaaaccattcgtagtttgaacgggcccggtcgatcaccgctgctaaccagtgtggattatcgccaggaacattgtaagaaggctcgatagcccctatcttttgccatgacccgtgcgattcgaggttgttttcggccattaggtagataccggcctcgtcacataattgataccaaggtaattgatcaggataatggcaggtccgatcggcattgatattgttagctaacatggtttggatatcagcgcgcatatcagccatactgataacgcgaccggtgtgggcgttccattcgtgccggttaaccccgttgatcaccaaccgtttattgttgacgtaaatgactttgtcatcgcgcagctcgaccgtccggaacccaaactgatatgggacgacttccaagagttggtgatcagcatcgtaaacttcaattgtcaattgatagagatacggcgtttgtggtgaccacaagtgcagttggtcgaataacatggtatcaaaggttacactgccactaccggtttgcgtttgactcgtcagtactcgcccgtcatggtctttaacggtcagcgctaaagtggctggttcgccggttactttagtagtgatgttgagctcaccacttttgagattggcatttggaactggtcggatgtccaaatcagtaatatggctagcaggctccgccagtatattgacgtcacggaaaataccagagaaacggaacatatcttggtcttcaataaaggcagcagtactgcgtttgtagacccgaaccgctaaaacgttaccttggtcctgaatatacggcgtcaaatcaaattcagaaggggtgaaactatcttcagcgtagccaataaaatggccatttaaccagacgtacagggcttcttctaccccttggaactgaatgataatacgttgccctttaaaagcatcgtcgagatcgaaggttttgaggtacgagccgacggtgttgtccgcagcgtcactgaataggcctggtgttaattgatcttgattgagggtatacggtgggcgacggtaaattttaccttcccatgggtatagcgtgttaatgtattgaatttgaccatagccggctagttcaatatgaccgggaacctgaatcgtatcaaagtcggttgcatcgaaatcgggttgataaaaatcaactgggcgttcagccggtgtcttggcgaagttaaaacgccaagcgccattgagactcttgatgaagcgactacccgttttgaattctgctgtgtcgtgataataatggtgatcactatgtgcaggtaattggttgacccggaagacttctgggtcatctaaccattgaagattagcttgcatgaggaagctcctttcaaagttacataaataaaacgcttacaattatcataaaacaaaatattaaatttgtatatgtcgttttagttaaattttaactaaatgacaacaactactgacaacgacaacgggcgataagaagaatttgaatcgataacgtgataaatttgtaaagcgttaccaaatcttgttctaaaggtcttatggggtgttgacaacaatcaaaaaaagcattatagtcaaactaataaaattttagtaaaactatttacggagggatttttcatgaatactagcgacttaaaacaggagtttaccgaagcctttgataccaagccagaacgggtctttttctcacctggtcgaatcaacttgatcggtgaacatactgattataacgggggccatgttttcccatgtgcgattacaatcgggacatatggtgtttatgcaccccggacagatacgacagtgcggatgtactcagctaatattccagatgctgggatcgtcacgtttgatgtcaacgacctttcatatgacaaagccgctggttggacaaattatcctaagggaatgatggacgaaatcgcgaagaccggcgttaaattcgatcatggttttgatttctacgtccatggcaacatgcctgatggtgctggattatcatcatctgcgtcaattgagttattaactggaatcatgttaaacactggttttaatctcggtattagccaattagatcttgttaagattggtcaaaagtgcgaaaacaactatgttggtgttaactccgggatcatggatcaatttgctgttggaatgggtaaaaaggaccaagcaattttacttgataccaacaccatggactattcttatgcacccgtaaagttaggcaacaacgtaatcgttatcatgaatacgaacaaacggcgcgaattggcggattcaaaatataatgaacgccgctccgaatgtgaagaagcattacgccgattacaaactaagttagacatcaaatcacttggcgatttaactaacgaccagtttgacgaagcggcctacttaatcaatgatgaaaccttaatcaaacgtgcccggcatgccgttttcgaaaatcaacgggccattcgcgcaactaaggccttggctgacgatgatttaacgacctttggcgaattagtgacggcttcccacgtttcactacactttgactatgaagtgactgggaaagaattggatacgttggccgaaacagcttggaaacaaccaggcgtgcttggtgcgcggatgactggtgctggctttggtggctgtggtattgccatcgttgataaggaccaagtcgatgcctttaaggaaaacgtcggtaaagtttatcgcgacacgattggttacgacgctgatttctacattgctgaaatcgcagacggccctaaggaactttaataaaagaattgatttaaaatacaaattagcagtaagcattgagaaatattgaggaggaattagaatggcagttttagttttaggtggtgccggctacatcggttcacacgcagttgatcggttggttgcaaaggggtatgacgtggcggttgttgataacttggtcacggggcaccgggcagcggtcaatgaacacgcgcgtttttatgaaggtgatgtccgggatacggcgttcatgaataccgtgtttgaccaagaaaacgttgaaggtgtcattcattttgcagctttctcagttgttcctgaatcgatgaaggatccgctcaagtactttgataacaacacggcagggatggttaagttgctcgaagtgatggctaagcacgatgtgaagaaaatcgtcttctcatcgaccgcagcaacttatggtgaacctaagcaggtgccaatcaaggaatcggacccacaagtgccaactaacccatacggtgaaagtaaattagcgatggaaaagatcatgcactggtcagatgtggcttacgggattaaattcgtggccttacgttactttaacgtggcgggggctaagcctgacggcagcatcggcgaagatcacgcaccagaaacgcatctcgtcccaattattttacaagtagctgctggtgaacgggatcaattacaaatcttcggtgacgactatcccactccagacgggaccaatgttcgggactatgttcacgttgtcgatttagctgatgcacatatcttagccttggaatacctaaagcaggggcacgatagtgatgcgtttaacttgggttcttcaacgggcttctccaacaaacaaatgttggacgctgctcgtgaagtcactggtaagccaattccagcaatcatggcaccacgccgcgctggtgatccaagcacattggttgcagctagcgacaaggcacgtactgttttaggttggacacctcagtatgatgatgtgaaagaaattatcaagacggcttggacttggaaagaaagtcatccggccggctatgatgatcggggaggccaagcataatgacgagtttggatcaatttgtcacggcggtgatcgcgtcgccttcgcaatatactgaattagatcggatctatgtgcataaccgggttcttggtttggtcggcgagggtgatccgattgcggcaagcgatgaccaattaacaagtttaaccgatgccttggttaaaacggcgattcaaaatggcaagatcgaagcgacccaatcggatgaagatatcttagcggatcaattgatggatcttgtgaccccgttaccatccgtattaaaccaacgtttttgggataagtatcaggttagtccgcaaacggcaaccgactatttctttaacttaagcaaagctaatgattatatcaagacgcgggccattgcgaaaaacgtggtctttccagcaaaaacgccatttggtgacttagagattaccatcaacttatcaaagcctgaaaaggatcctaaagcgattgcggcagcgcgtaaccaaccgcaagatggctatccactttgccaactatgtatgcagaatgaaggctatctaggccggctcggttacccagcacggagcaatcaccgaattattcggttaacacttggtggcaatacttggggtttccaatattctccatatgcttactttaatgaacactcgattttcttggatcaagagcaccggccaatggtcattaaccggcaaacttttaccaacttacttgaaattgttcagcaatttccacattactttgtgggcagtaatgcggacttgccaattgttggtggttcaatgctgtcacacgagcattaccaaggtggtcggcacgaatttccaatgatgaaagcgccaattgcacgcacgattgacttaggtatcgcgggtgttaaggctgggattgttaaatggccaatgtcgacgattcggctgacgagtcaggacttggttgcattaacggatgccgctgtgaagattcatgagacgtggaagaattattcggacgagagtgtggatgttcgtgcttatacggatggcacacgtcatcacacaacgacaccgattgcacgcaaagttggcgatgactacgtattagatatcgttttgcgtgataatcagacgtctgctgaatttccagatggcatcttccatccacatcaggatgttcaacatatcaagaaggaaaatattggcttgattgaagtgatgggccgggccattttaccagcccggttgaagaccgaattagctgaagtcggcaaatacttgttggatcagcctaatcaaatggtcgcgatgcatcaagcatgggctgatcaattgaaggccactaataccatcaccgctgacaatgtgacgactgtcattgatacggcggtcggcaacgtctttgcccgggtcctggccgatgctggggtctttaagtgggatgacgctggtgaggcagcctttgatcgttttgtcgcagcaatgcacgattaagttgttaatcaaatgaagacgtggggcaacggggtgttgcagacgcgatttaccgatgagtcatgattggtgaatagtgtcacgcccagttgccccacgtttgttattcagtgctaattaattaagagaaaagaggaatgacgatggccgtaacgttaaaagatattgcgcaacgagcagatgtctcattggcgacggtatcgcgggtcttaaattatgacaagacactatcagtgagcgagcagacacgcaagcgcgtgtttacgattgctggcgagctgcggtacagtaagcgtaaacgtcagcatataaaggcgctaatgcggaaaaatatcgctgtgattcagtggtactctaagattcaagaacatgatgacttatattatttagcgattcgtaaaggaattgagcatcaagctcaagtgtgtggttttacgacgactagtatcttccagaataatttagatcaggttggcgatgatattgatgcaatcgtggcggtgggaaaatttagccctgtccaagtacaacagttgagtcgtttgtcaagccagcttgtttttgttgatgacgatcactttgctcagggattcagcagtgtggtgactgattttacgtttgctactaaccgcgtcgttgattatttttggcggcgtggtatccgagatatcggtatgatttatggcaaagagtggtccactgatcagcaggtggagattcccaatcaacgtcagcaaagctttgaacaggcgttgcagcggcatcatgcctatcatgctgagtatgtattagctggtgattacactagtcaatctggttatctgatgatgaaacgggccattgaaatgttaggtgaccgcttaccacacgctttctttatcgctaatgatccgatggcagccggtgcgctcaaagcgttacagcaagctgatattgctgtgccacagcgggtcaagttgtttagtttcaataacacgacgctggccgaatatgtgtatccagagattagctcggtcaatgttgagactgaactgatgggaaagacggccatcgatttgttggtgagccgattccaagatgatcgtcaagcagcccagcgcattgaactgggaacgacgttggtagaacgtgaaagcaccaaatgaaatcatcgagtgttcgtgaaatttggcagaaatatcgtaattaattaatgtgccacccgattgttaaaaagtggtgcatgactttgatgggcactggttggtattgaatagcgcacgtgaatgggttgattggtcatgctactactttctgattagttggtctgttttgctaaggtgtgaggccataataacgacaattgtacccttcaagggtataattgtgagtgaggtgatgaaaatgaaaacaactgccacaatccttaaggagattcggcaacattaccaaattagtcaggcaaagctggcaaagttactcaacacatcggttagaacggtacagcactgggaacaagcggactaccaaccaagtggcaccgcggtacgtttgattcagattttggctacggacgatgcggtgtataccgcactgacaaacctcgaggaggagaatacgattatgtatttagaacacgatgatcagaagttcaccatcatgggtgtgcagtttcggaatcaagaggaataccgggcgaccatgaatgcaattatcagcaatatgtatgagggttttgagccgactaaggaagatgttcaagacgctcgtcgtttctatgacgaaggcccgattagcgcacaagagatgctagcaagaatacgtacttcgaccaatcgtaaagccgaatgagaaaggtatgggcggactacctacaaccaaacggtactttgaaaaatcgcttaggcattactgaagcggctactttgcagaaaattgagtacaaagtgagtacgcaacggcaacagcaattatcccgcaatcactatcttctgccagactctcatcaattgacaggacgtcaaattggagagctaaaattgatcaatgggtttttgctcggtgaaatttacgactgggccggtcactatcgcgaagttgatttcaacaagaccgcgaatggcgtagtgacgttttttcacccggtggctttatttggtaatgctgagatagatattcaacgccaactcgataattttgcgctgttaccggatgaccgggaacaagttgcacaggcgttagggcaagttgtcaccgaaatcaacatgtttcatccgtttcgggaaggtaatggccgcacgacgcggctgtttactgaggttttggcttggcagcatggttttgacatcaactatacccaggcacagcaggatgcttacatgcaagcgtcaattcaagatgatgctgagatgatggcacaggtgttcctggaagtactaaccaaatagatcaattattgttagtcgtgatactaagaatggtcttaaattaaaacaacaagtgcactcggaaatttctaatctgagtgcacttgttgttttagcttagtgagatatatgacgtttgtcgcagcggtcaattttactgcttgagtgggccactaacttttcgtttatattcggatggggtggtctttaggtattttttaaacagacgaaagagtgatgaggtgttttgatatccgatgatgtcgcaaatgtcagcgagtgtacagttagttttgatcatcagattttgggcagcagaaattcggcggcggtcaacaagttctttaaaggtcttgcccgtcgcttcttttaatttgttacccagataattcgtattataagagaacttggcgctgacatcacgtaatgtcacgctggcgaaattctgattgatgtactgaatgattggcaaaagattgtcgtccgtattgtcagaaaagttaatgtattcttgctcaatcgattgcgataattcaagaattaatgtagatagcagcaggcccattgatttattacgttggcggctctttgtaaggcccttgataattaaactttcaactaaattgatggcaacttcttggtgtgttaagtcaaacagaataaagttgttgtgcaacgtattgatgtgggatgcattatataaaaattgagtgatttcattggttgaaacggcaatatagtcgaaaagttggttcatcgttgagtcattcttgagcaagatgttaatcaaaatatcattactgcccgttgattcaatttgctgaacaatgtctttatccatcaaaattaggttgtgctgatggagggtcactttttcgccattaatatactgagtacaagtgccagcatacatataattaagctcaataaagctatgcgtgtgagctggaacataggaaaagcgattatttttggtaacagcaatatcaccgtgcttaaaaaaatctgagcggggcatctggggaatcggattattcacatagtctaagtccatgtagttaacgttaccatgtgattggcgttgctttagctcaaccggtgtcagagcaaataattcgtaattgagaaatttactagtcattaatactaaccttctttaatatttatcgtttagtacaacctgtgattttgcacgatcattcatgtagttgagatatggtaccccttacagtaatcgcttacaatattcgtataaataaagggaggttcttcatatgaataacggcgagacgtcaacttcaatggtgaaaaaatatcggccattagcagtagctgcaggaattggttccattctaggatcaggaattatcgttggcttatccgcgactattacagtgtggcagaacggactaggtcttactaacagtcaagttggtattatttcaggtgcactaacttttgcaattgcaattggatccttattagcaggacagataacaaaatcttttggtctggttaaatcgtttaattggttaaacctgatttatgcgattggcgccttgatctgtgttttctcgaataattatatcatgcttttgattggcgtcatcattaccgggttagcttcgggtgctgatttaccaattagtttaaccgtagtttcgcatgatgcaccggatgataagacctcggctagtttagtatcgtcgacgcaaatcttctggcaaattggggttttcatgtcttatgtttgtgcctttattgtttctaaaatggccggtgcttccggtgctcggattgttttttcgattttagcaatttttgccttgattacttgggcatggcggactttttcaactaagttccgagcatttcatgaagaaggtgaacaacggcgtattgatcgcgaagcagcttcacagacaacagagaaggtctcgattaagacggtcttcgctggtgccaacaagggacgctttatggcattcttcttcagtattttaatcttctatgtttgctggaatctactggccaatacgttcggacagtttcaaacgtttacgctggttcaagcacatgcgagtcaaagtttcgcaactggtgctgggatagtcctaaactttatctcgttgttggcaaccatggcttttgcatcagtcgctgggggtaagtatcgtaataagttcttcttagttgggattaccgttcaatttttggcaatgctcggactagcaatgagtagtcattcgttatggccaattgtcatcacgattggctgttacaacattgggaataatattgctggtgaagcgatgtataaagtttggacacaggaagcatttccagttgaagttcgggcatcagttcaaggatttattaatggcttttcacgggtatgttgtggcctatttgccttaattacacctgcgttagttgtgccatcagcaattcgtaacacgatgtttgggttcgctgccattgtctttattagctttgtagcagggctgacaatgatgcgattggaaaagaaacatggtattaataacttttaaacaaagtatttagaaagcgagtggaagagatggcgtttacttttcaaatcaataatgatgttcaatttcggcataatcaagcattattagacaagtcggcaagctatcggccaatactgaaagaaacccaagttaaggcggcatcgattgtggcgctcgagcgtgatacgcaataccttgaaggatggggtgttaaacaaattgcacctattgaacgattatcaagttatgagttgaaacgtgacgaccaaattatcatagattttggcgatcatcaggttggtcaatttagtattaatattaacgctgttggttcaccaatggatgcaccactatgttttaagattaagtttgctgaaatgcctgcagaattagcacgcaagagtgaagattacgacggttggttgagcaaatcttggattcaagaagaaactgttcacttagatgtgctgccaaccacgctgacgttaccacgacgctatagttttcgttatgctgagatcacagttgttgatacgtcaccaaaatggcgagctgtttttagcaatccagtggtcacggcgacaagtgcggtagacactgcgacagttcatcaaccggaattagccgatgcacaattacaacggatttatgaggttggcttgaaaacattagctgattgtatgcaggatgtctttgaagatggaccaaagcgcgatcggcgattatggattggtgatcttcggctacaagcattggccaattatgcaacgttcaaagatacagatctggtcaagcggtgtctgtatttgttcggtgcgatgcctacaacggctggccggattcctgccaatgtttttactaaaccaacggcagttccagatgacaccttcttgtttgattacagtctattctttatttcaattttggctgattatgaggcgtttagttctgataaaacagttttgaatgatttatatcgtgttgctaaaaatcaaatggatttggcgttggcacaagttacttctgaaggtaaattgaaattgactgaagaaaatccggttttcatcgactggtcaaatgattttgacaaagaaacggctgggcaggccattattatttatacgctaaaacaatttattacgcttgcggaactggttaatgatacaagcttagagacctatacagcgatactgcgtaaattaaaccagtacgctaaaactcaattgtttgattcgcaatcggggttatttgtctcaggggatcagcgtgaagttaatgtggcaagccaagtgtggatgacactagcacatgttttggatcctgagcaaaccacggcgcttatgcaaacgaccgtcacgaaactgtttccaattactggtattgcaacgccgtatatgtatcaccatattacggaagcattatttgaagcaggcttaaagcaagaggccgtccaattaatgaaagattactggggcaaaatgattacgctaggtgcggatacttattgggaagcatttgatcctaatcaacctgattattcgccgtatgggagtcccattttaaatagttattgtcatgcttggagctgtacaccggtgtacttgattaataagtacctcgtttaggaggagtgtctgcgatggttgacgaaaaagtaaagctgagtaaagcaaacgtactcttaataattgttgctggtctagcttcctatatggatgcagcgttgctcgttagtctgggagtagcgctacctatctggacaaaatatttagcactgaatagctggatggtcggactactaagtactatgctgacggtcgcggttgcaattggttcatttgtgggcggctggctgtcggataaatttggccgggtcgcggtgtttaatgctgatatcttttttgtcgcgattggctcgtttattattgcgattgcacaaaatacgacgatattgattattggtgttgtgattgctggtttggcctctggtgctgatttaccaacgtcattggcggttatttcggaacggatgtctagtaaagtttatggtcgggcaatttcttcaactcagattttttggacgatgggcattttgttgtcacagtttattggttttataactgctaacagtggtatgggaagcccggcagccttatttggttggattggattagtggcaattattaattggtgcgtgcgggtcttttcaaagcgttttaaacagattgaaacagacttagttgaccatgaacatgtggactgtgcatctaacggtcaatcggttaagaagtatcgattaggtcagctattgcgaacaggtggtttgttagtaccaatgattctactaactgttttttatctattttggaatttgccggccaatacgtgggggtcatttgttaactatttcttagtgactgttgatggccgtacgcaagcctattcgacaatcgtggcattaattgccaatattgtgtgtctgttagttaacctgatctatttaaaggtttcagacactaggtatcgctaccgagtgatgtatttaggtattgccgtagcattgctttcctttgtgactgcagggatctttagcgatgactggcagattttcaccgttgtttatattttctactctggtagtacagtattatgtggtgaggctctttataaaatttggagtcagactttctatccagtggatgcacgggcaacgatgatgggcttttcttatggcttagttcgggtgctgaccgctgctttctcgctagtaacgccaacattaatgggatattcgccgcaactattattatggattatggttggatgtacggtgctattcggtgcctgtgcagtgatcattgtcgctattattaagaagaccggtttaaaagacccaacgatgaaaacggtttctgaataaactgattaatattactaagaattaaaaatgtaagccgggcattgccgggcttatttatttaaaatcaaggaggataatgctcatgtcaaaagaggctgtttggttatggtatcctggtgattttgaaatccaccaagggatgttacaaaattttaaacgtgaagaacgtgggatgggttggcctgcctattggtatattgatgattgcgaagtcatttatcgctatcatcccaggggcagcaccactactattctttaatattattcgttacgcatttacttttactaagtggggcaatgcagttgactttgtatatgaaattttacaacagcctctgatgggactaggtagtacgctaccggctgtattgattgcggttgctgcaactcaaattttttggtggtttggtatccatggaacgttacttgttaactctattattgatccaattatgggtgcgttagcgattcaaaattatgaagcatataaagctggtgcaacgcatctaccacatattattaacacgactttcatgggcgtttttgttaatcaagggatgcagttaggatgtgcaattgtttttgcgtttttcttagctaaatcagtccgaatgaagaaaacgatgaagatggttttcgcacctgcaatctttaatgtttctgaaccaatgacttatggattgcccatcgttttaaacccaatcttgtttgtgccatgggttttagcgccattggtttcaacgaccatttcttactttgcgattgccattggattagtaccacgtccgattggtgcgacagttgtttggacgactccaattttcttagccggatggttaggtaccgggtctatcgcaggggctatattgcaattagtagatgtcgttgtgatgacattgatttggattccatttttgaaggccatggatcgtgaatgggtacaggaagaattaaagcctacacctgatgacttaactgaatagggaagagtgatggtattgagaactgacacgctgtcgtataaatatcgctatcgagcactaaaatcggagttatatcgtacgcttatttcagaacaattaaaatattttcaacgaacggataaaagtattcaagttctaacacctggaacgacaatagtggcaaatttacagacaaaaatgcatcaattagtcacacaaaatacgatgaaagtgaatattatgaaggcagatgatacatttcagttggaaacacaacagccctcagggaaaattattcaaacgtataaatttgatacagaacgttccggagcgaaaatcttggtttattcagagcaaaatgtgtttgaaagtaatcgtaatcaaatgaactttatgatttttggtttgatgtataagtatttttataaccgtggtgtcaggaaacggatgcgatatttagatgatttagcgcaaagcgtcgaataataaaccgttcgtataaggagctcatgacattggtttgtgggctccttgtacacactaaatgaatggtttaaaagtagcagaaaagggataactgaaatgatagtaagtggcacgacaaataagatgtttgaaataatcaatggacagacttttcatttatataatcgtaaagttagctatgtgctaacgattatggaaaatggtcaattagggcatttatattatggaaaaagcttaggtcccttgtccattgcggatgtggattatctgaaggctcagaatagtaaatctgctgggactgtcaagttttcaccagatactggcaattttacacttgctgatcgggctcaagaatatccagtatatggttcttcggattttcgtaagggtgctattgatattagttataatcaggaaccttggtatctagattttaagtttgctgattattcgattacgtcagataagccacggaatttgaactgccctgaatcgtacgcagttggcagttttgaggcgacacaattggatatgcaactgatagatgaggaacatcatctagagttggttgagcattttacaatttttgataatcaaagtgcggtggtgcgaagcacaactattaaaaattgttcgagtaaaacgattaatattgaaaatataatgagcgcttcgctggaattaccagatgacaagtttcaaatggttaacctatcaggtgcatggctaaaagagcggcatgtaaagctgcacaacttagatcaaggaactgtttcagtagaatcattaaagggcgcatcaggacatcaacataaccctttcattgcgctgatacgaagtcaggacttaaatcaaggagaggtctatgctagtaatttaatctattctggtaactttgtgagtcaagttgaagtaaatgaatggcacaagacacgtctaatgactgggttgaacccaacctattttgggtggaaattggaaacaaacgaaagcttcaaaacacccgaagccgttatttattatagtaatcaaggaattaacgggttgattgatgcttccacaaactttacaaaaaggcatgtaattgatcgtcgctggaatcaaagagagcggccaattgtgttcaataactgggaagcaacctattatgattttgatgagcaaaagcttttaacactggctcgccaggctaagcatatcggaatggagtgctttgtcgttgatgatggctggttcggtcatagaaacaatgatcgaagttcattaggggattggcgagttgatccgcagaaattcccacatggaattgacctatttgctaagcagattcatgagttgggattgcaaatgggattatggtttgaacctgagatggtatcgcctgataccagtttatacaaagaacatccagactgggttgtgcggcacccttataagtctgtgtcgattggccgtggtcagtacgtattggacttcgcaaatcctgaggtagtcacatcggtttatcaacaaattaaaccagtcatattagcaactaaattggattacatgaagtgggatatgaatcgtaatattacggaagcgtactcaccatacttaaataggtgtaacattccacaaactgaatttttccatcgatatgctcagggcgtcaatatgctataccaattaatactaactgactttccagacatgctaatagaaggttgtgccggtgggggaggtcgctttgaccttggcaccttattttatagcccgcaaatttggccgagtgatgatagtgatgcagttgaacggttatcaatattgactggaaccaccttggcctatcccctatcgtcatttagtaatcatgtttccgccgcacctaatgaccaagtaggaagacaaacttcactcgcttttcgacaaatggtggctgactttgggccactaggatatgaattggatatttccaaattaccgttggatgaattaacacagataaaggagaacattgaattttatcaggtccatcgacaactttttgtgaatgggagattcagacaattgcaatcaattgatccctgcactaatgaggtaatttggagtgtggaaaattctgatgatacagagatttttgttggattttatcgtaagctggctacccccaatgctagtattctgaattatgtcaaattacctatgattaatccaaatctaacttatcaaattgatggtcgtgaaaaggttagtggcgctgtgctacagcagttcgggttgcgacaaccatatcaatttaatggtgttaatcttgacacggcagaattatatggagattttcaatcccatttatatcacattgtcagtattgaatagctaggagtgtgttgcatgaataagttagaactggttaaaggctttttacatggtggtgactacaatcctgatcagtggttaaaacgaccggatattttggaccgggattatcagttgatggatcagtcgaagattaacacggttactgttggtgtttttgcttggggacggcttgaaccggaagaaggtgtttatgattttgcatggcttgatgatgttttcgataaaatgaatagtcgaaatggccacgtgattttagcaacaccaagtggcgcacggccacgatggatgagtcagaaatatcctgaggttaatcgagttgattctgaaggtcgtcgtcatactcatggtttccgacataatcattgctattcgtccccgatttatcgaagaaaggtacatgaaatcaatatgcgcttggcagagcgatatggagacaattcagcgcttgttttgtggcatgtctctaatgaatattctggagagtgttactgccctttgtgtcaacaaaagtggcgggagtgggtccagcacaaatataagacacttgaagcattagatgacgcgtggtgctcgagcgtctggagtggtttatacagtgattggtcacaattgttgccaccatcactattgggtgatagcaaagttcatggcatggatttagactggcaccggtttgtgtcagatatgacgattgatttttatcagcatgagattcagcctttaaagaaagtaacgcccaatattcccgtaacaactaattttatggctgagagcttaaaagaagggcagtatacaccgctgacagggttagattatggtagatttgcaaagtctttagatataattagttgggatagttatcctagttggcataatcgctatgaaattactgcggaaactgccatgaaaaccgcgtatgttcatgatcagttttggtctttaaaacaacaaccatttttggtcatggagtcaacaccaagctgtgttaactggggacagtataataaagccaagcaacctggcatgcatcggctgagttcatttcaacagattgcgcatggctcagatagtacgttatacttccagattagacaggcacaaggtaattcagaaaagtatcatggtgccgtaattggacatgatgatagctcagatagccgcgtttttaaagacgtgcaacaatatggacaagatttggaaaaaattgtagaagttaaaggggctattaagcgtgtaagagttgctatcctctttgactgggatagcaactgggccctgaaccgtggtggcggctttggtcggccaactagattgggaatacaagtacttcaaaaacattatgcaaatttttggcacaaagatattgagtgtaatgttataacgagtgatatggacttttctcaatatgatttgttaattgcaccgatgctttatttaatacgacaagatacgatgaaaaaattgcaaaaatttgttcaaagtggtggcacattggtatctagctatttttcaggtatggttgatagcaatgatcgtgtgaatttagatggctggcctaaaccgctacaggatatttttggaattgagccaaaagaattggatactttattaccaggcgagcactaccatgttagttttaatcaaaaagagtatgaaactaccgattatgatcaaataatgaaagttaaaaacgcatcagtgctgggatactacacagacaacttctatgttggaacaccagcaattacacggcatcagtatggtaaaggaacggcctattatattggtgcacgcttgtctgcggaattcattgaagacttttatgatgacattattcaaagccttaatttagataatagttttgtcgaattgagcaatccggtagtatcagttcaaactcgttataatgaggattatgcctatcactttgttatgaatttttctgaacaagtacaaatggttaattttcgacgtccatcctttgatctgcttacacagcgagaagttacgaaatcagtgcaaattgataagtatggggtcatgattctgaaggaaagacagaacaatacgttgcactagatgaatatcttggtgaactgatttagagttttggaaagatgttcatgattaggggttaagagaatccaaattaaacatgactactagatatagcgtgtaaagtcactaagactgttgaataattcattttactttcgttactagagactctaaattaatcatggcagcataatcaacaatgacttataaggattggttgtgatcaaataagcactgctcacaaaatagtgggcagtgcttatttggcattcattaaattgtttaacaagtacggtacgggttagcgtttcatcggtacttccatgccagtgctggtctttgcccgctgtaacaacaagtagtgggccgtgccaaagacggcaccaactagcgcagggactaaccaatccattccgctgctggcaagtggtaagaagctttggacatgcgccattgcttggccgaaagtactttggctaacaacggcggggaaagcggcaaccatatcaaagacggcggggacgacggtgaagacgacgacccaaacatagacgacacttgacttgtggaagagtggcgaaaggatcgataagaagattagtgccatggctaacgggtaaaggaacatcaggacgggggtggaccaggcaatgatctgatttaatcccacattagcagttaaaaatgaggcgaggcacgtgattcttaaccaggctttgtaactcaagaaaccgaagtgcttatggaagtcctgagcgaaggcggcgacgagcccgatagcggtggtcaaacaagtggtaatgatcaacacggctaaaatggcttgtccgacattacccatgtagtggttaacgatttggtcaaaggcgaccccgccgttatcggataatttgaattgacctaacgattgcgcgcctaacaagattaagagcacgtaaatcaagccttcaaaggccattgagaagaagccagctcgggcggtcacccacgcggctttgttcgggtcggtttggcccatgaaattaacggcagtgacgatagtgacacctaacgccaacccagctaaggcgtccatcgtgttgtagccttgcaagaaaccattggtaaagcctgcggtctgataggcagcagttgcactggtgctaccggcatgagctagcggactgctgaaagctacggcgaagatggcgactaataatagcaaaaataatggatttaataatttgccgacccgagccataattttgctctgttcaacggacaagtagtaggcgagtccgaaaaatgcggcggaaaacagcagtaatgcgagtgattgatactttgctgggaaaaacggtgccagaccaacggtgaatgatacggtggccgtccgtggtgttccaaagaaggggccaattgtaaagtgtatgagaaccatgaagacaacggcaaaggttgcgcctagtggtttaccaatgtcataaacgcccttagatttagtgacacagacggctaaaaccgatagtaagggcaataaaaccgccgtgatgagaaagccggccgcagcaatcccccagtgaccgcccgctagctgacccaagtgaagtggaaaaatgaggttgccagccccgaagaataaggcgaaaatcattgaacttaaggtgacgtaatcacgtttggttaagtttcgcttttgaactcgatttaacatatcaacagcactcccttatttgattgagacaataatcattaaataaaagttgcgattaaccaaaaaacgtcctgatatctgagttagactcagaaaccaggacgtttgaacacgtgttaccaccttagctttgtgactgccttacgacgaatcaccttaaaaagtacggcaagtggccggccacttgcgatacttcggctcaataatgggagcaaccaacagcaactaacatcaagctcgtcactgccactcagaactgattttcaacgatctggtcatgatgtcattgcaccaaactgacactctctaggcatttccagaaggtttactttgttcatcggcgtgtttgttaatcgatttttaatgtggttctaatttacaaccgcgattagtatttgtcaatcttttttcaaaaaaagttagttagctagtgcggattcttaaataaagatggataatagctgtaataaggaaatttgtgaggagggtccgctgatgaccaacaacaatgaggaaaagccccaatggcaagtgaatcagaaccgccatacccgttttcggacgattgtcagtgtcttgcggcgctataacgttttgagcaaccttgcacgtcagaaaaatcctgatcaagtgcgcgcggcgtttgaagaacttggaccgacgtttattaaaattggccagattctttcttcacgtacagatatcgttaagccagaatttgctaacgaattcaaaaaattgcaaaataatgtccgggccgatgattttagtgtggtcaagcaaacgatcgagcagcagacagggaagccaatcaatgaaatgtttgcccagtttgacgagcgaccgtttgcatcagcatcaatgggccagacgcaccatgcgacactgctcaatgggcagaaggtcgtggtgaaggtgcagcatccgggtattgacgccgaggtggccctagatatttcgttatttgagcgggcgttacccctattgcgatatattccggagtcttcagttgttgatttgcgcgaaatggttggtgaaatcaaacggtcactattcaatgaattggataccagtattgaggtaaaaaatggattacggttttaccgattgaataatgcggacgatattattcgggtaccccgggtttatgcgaagtatagtacgcaaaaagtgcttgttaaccagtatatgccgggaacgacgattcagcattttatggcgcaaatgcttgcggccgatgaacacggaaatcaccagtatgatgacgaacgccgctatttggcccatgtcttggtgcaaaatttcttgaagcaggtttttgaagatggcttttttcacgctgatcctcatccagggaatatcttattgcgggaattgcaaccagatgatattgggtatcacgatacggttcccaagcatggcgggaaaattggcaaacggcagttaccaccataccggttagtttatctggattttggcatgatgggtgagatcagtccagctttgatggcaggaattgctaatgttgtcgtggcagtgacaaccgaagatacccatcaagtcggcaaagcaatcttagcgatttcaaaccgaactggcgtggttgatgaagaagcgttctttagtgagttagcaccatttttaagtcagtattataattcgggactgggcgacattgattttcaaggcttgttgtttgaaatggtcaaggtttgtcgcagtaataatattcaaatgaatccagcggttaccatgttaggtaaggcgtttggaacgatcgaaggtattgtggagacgctcgacccaaccttatcaatgatggacgtggcgcggccgtttgcgcgcaagtacatccgcgagaattttaattggcgcaatgaactggaagatggcatgttggctagccttcaaagcctgcgtgatgccccgaagattccgtcacgcttattatcagctctagatacgtttgataatggtcagacgcgggtcaacttggtctttgcacaccgcaagatgtttattgatcggattgattcgatggtcaataagattgtactgtccgttattctggcagcgctgattgttggatcatcactactagttcaaagccatcctgataatagttggattacaaacattggtattttgggctatgtttcagcagttgtcgtcattattggcctattgattggaacgctccattcctggtacacgcattggcgacgcaagtaaaacttggcgtagggttaggctatagggccatgcgtcatgagaagttggcaacgtagattcgtctaattgagactgcctaaaatataagcatacgaaaaacagcggtaccgtgatgattccaagccataaaatcatcacggtaccgctgttttattaatcatgtttcagtatcaaattgatcgtggttaatggtacgactgtcaattgctaactagtcttctgatcccataacccgagcacagaatgcggccaagatggcgccgacttctggtgctaagatgtagacccatagatgtgataaggcgctaccaccagcaaaaatagcggggccgattgaacgggcagggttcaaagaaccgcccgttaagttgagagcgacaataatcaagaatgctaaggtcaccccaatggtcaaaccagcaaagtctgcgttaccatggtcattactagtaacgttcagaataaccattaagaataagaatgtgactagtgcttctacaaagaaggccataccactgccgatttttggaaaatcggtttgaccaagcgatgttgcggataagcctaatgcactgacaaacgacttaactgctgcggaagcaacgatggccccaatgatttgggcgatgatatagccaatggcatcggcggcatcgattcgacggttgattaacatcgcagtcgtaacggcggggttaaagtgaccaccagaaataccaccaaaggcataggccgaaacggtaatcgctaacccgaaggctaacccaatagcgaggacgtcacccttagcaatcacaacggttgcagtccctaagaaaactaacataaatgtgccgagaaattcggcgagatacttgcgcatagttgcacactccctttttgaataattgctaacttaacctattttacaatacctgctcgtgaaaacgacggaatttgtttgatttgtgaatatttctgataagatttttataattatattaattgataagatactggtaaaacgttggtataaaaacgttttatggcagttgtggattgttaaaactataataaataaaaattttatttttgcatagtcactattgatagtagtcagtatgattggtgtgtgatctaacgtgactgtgaacgctaattgtcgataatggtggcttctgttttataatggttaggacaagtaagctgatgtttttgaaaacgaattaaatttgtttcacgtggaacagtaaaggaaggtttaattaatggcgttatcatatcaagctctattaacagcagttccggtcgttttaaaagcggggaacgtaccgaacattgtcggtgaagccgggattggaaagtcggccttggtagccgaggttgctaagcggatgggggcgcaattatacacgaccgttgtgagcctgtccgaaaagggggatttagcgatcccagtcccaccactaacgagcgactcatttattcaaacgaagcgctatggccagttggctgacgtgcaattcggctatgcacacacgttgattgaaattattcagtatgctgagcagcatcctcagcagccaattctgtggtttttagacgaatttaatcgtgggacgcaggctgttcaaagtgaattgatgaatctggtcttgcaacggacgattaacacattgaaattgccagaacaggtgcaattgatcattgctgaaaatccagatgctagtatgactggatttgaaagtagtacgtatggcgttactgccggcgatgcggccatcaaagatcgtaccgtgcgtctagttatgcgagcagatgcggcagactggcttgcttgggccaaacaagtggatgagcacatgaaccgaccaaacattcatccactcgtccagcagtttattagtgaagatgtaacgcggcttaatcaggctgatgtccaggctgatttaacagcgacgccacgtgcgtgggcgcgtgtttcggctaatttatatgagattgaaaaacttcctgtgcatcaacaaacggctgtggcactggatatctttcaaggagatgtgggtactgagctagggcttgtattcgagcaattcttggaacaacaagccattcatctgacaccagcgatgatttatgacagtcaaccagtgggggccgtggtgccggcaccgattcttaagcagtttacggcgatgaatgaaattcaaaagcgaacggttttggcaagctgtttggctctaacaaccacgtatccgttgacggacgatcagcacgctggtcggttcatgcaactcctacaaacactcagtcaagatggtcagtttgcattggttcaacaaatcggccatgaacgcgacttattaaagcaattatatacagcaaatgttgccaagcaaagtccgtatgtgaccgctttgtatcagtatttacaacaggtcgccagttggtcaaatcagtaagaaagcagtgagtcatcatgattaacaatgccaatgagtacacacgttggcaacaagcgatgttagtgacgccaacagcagacacgatccaggcaggtgcgaccatgattgatcgggccattattgagttactagccaccgatcaattttatggcgagttgctgacccgacttcccagacagttaaatacgacgttaacgacgccgtttatcttagcttggcagaataatcagttggtcttacaatatgcgccaacagtaattgctcgagctttttcacagttttcttacttacaagcggggttaaaacacgtggcactacacattgtctggcaacaccccgttcggtatcgtgatcaggtcaagcagcaaccggagttagtgacgttggcgaccgacctggccgttaaccaatatgtcgacggtctgcctaaagatgcggtcagtttaacgactgtccagccgttagtcgatgcccagctaccgcgacgagcagattctggctgttatttgaaattattacagcagcagtcgcggtcgcaacttcagccgaatggcgcgcccaccgccacttcgcgaaataaggaccagcggcagccagcaaaagggtctggcgaccaaaagtcgcaacagttgatcgatgatccaagtggctggtcagcctctgaacagttaacgaatcccaatttggcaactgcccgtttaaaacagttggcgaaagatgcttggcagcaaacaaatgaagctggccgagggttagtggccggcaatgttcgagctcagctcactgtaatgacgcagccggcccagcttgattggcgacaattactagttcggggcctgggtcagattccgagcggtactaaggcctcgcacgcgcgctttaatcgacggcaacccgcgcggatggaaatacccggtcaaattggcgatacgcgcttggacttgcaagtttatgttgataattcaggttctatcagtgatctgatgctgcaacgattactggcacaggtggctactttaacccgattatttgcagcaaccatcaccgttaagccgtttgatgcaatcgtacagcctggtcaaacgtatcaggtgagtttgccacagcagattcgctttacgcgccgtggcggtggtggaaccgtttatcaaagtatttttgatgatttactaacacatcataagacgaatgcgacgaccttggcgctgatcttaacggatggccgtggtgaacggcacgtcgagtcacaccgttttacaaatgtgatttggttgttagcgcgggctgaagatcgattgtcgattgagccagcaatcggtcatgtagttaatttgaacttggaggatgaataatatggggacaccacttaatccagatgatatgcaatccttgttgacccatgaccgtcgttatcagcgggccagtgccatcttaacggatcagtggcaacgaatcatagccgatgaagatttggcttaccgacaacagattacgattgacgatttacagtttgctaaggcgttgctagctagtgagacgctgacaagtcaatttgaatttgaccattacgcgggtgtgcaacggttgcgacaacattatggtagtcaattgacgagctcagcacagcactggttagtgcaaaaatatttataagtcaatcgctagttatgacccaaaagtatgactgtgacttatatatagatgaaaaaataaagcaagcttttcccaaaatgttcgggagaagcttgcttattttatgcgctgattaactgctttaggttcaacgacgtgctagaaaagccatccaggcttgttgctgcgcttgaatatctggctgactgccttgacggagtcgcgtttgaaggccaatgcgggcttctagcagtgcctgagctaatgtcatactggactgattattgataatttgctcgttagcttgacctttgaggatgaccgcagctatgagggtcaggtagtcgtcataaaaccagctgacggcttgctgaacatcagtatcagtagtaccaaattcagcgacggcgttagccattaggtcaccggctgtttgttcggctgtcgttaaatcgtggctaaagagcatactcaggatagctaagggggcggcaccatcctgctctaagcgttgcattgcttgggtacaacgcattaaagtttgttggtgatagcgctggagtgcacgcaggtaaagtgtgtgcttgtccccgatagcgttatataaactttgcttcttgacgccactagttattacgatttcgtccatggaagtatgataatagccttgctgccaaaataagtgcatgattttttcgataacttgatcgtcttgaaatgtctttttagcgggcatgattcgaaccgcctttctggttaaaaataagtgttttaagtataccacagcacacttcattgtttggtaaatgaatattaacgtttgaaattatttgattagggggcttttactgtttttaaagccgattttaattagttgattgtgttgcactttaaaattgataaaagatttccacattaaatcgattacataattttataaattgaagataatttatgtaatagcttgctgttacaacgatattctaaatatatataggatttcaatatttataattatcaaaatttttaacttatgtgtggcctcatcaaagtctaacgataatataatgttgacggtttgtttagttgaacacgccaactagttggacctaatcggataaatgaaagcagtaggaaagcttgccgttaaactgattacagtagtttatattaaaatatttgtaatcactataatattaaaaatggctcagaagtccgttaaaataggaattttaatcaatagttaaggggtgtcatcaattgacagcgattccaaaaccatgatatattttcgttgctgatagggttactcacaacgattcactattggtactaagcgttaataatgatactaagcttaagtcaatatctggaaaggatgtggtcatattaattggatgggcagctttcaagacttaggtattagtcagctagtcaagttaccactagtagctgatacgcaatcaggcacttaccacttaacgatcacttctaattcaggtggcaatgcggcggccgataaaattgcgagcccgctacaaggtgtattaccgcaaatgaatgggacccagcaatggattctgttcggtatcggcgtatgtggacttagtttattaatattattaattctaatctggtggcgcaaccgtcaaacaataaaggagcaaccaaaatgaaaaaatatctcggaactctcgttgcaggcatgacactaatggcaggattaccacttgttggccaagctgcagatacggagacaacgaccaaagctgaagttgaattaatccaggatgacactaataaagatattaccttggatcaagcacctggtgttagctttgggaccgaaaaaatcactaatgacagtaaaacctatgatgctaagaacgttactggcgacttgaaagtgaccaactctgggaatacggacggatggttagtacaagttaaaggttcgaagttcatgaatgcagatgatactcgtgaattacggggcgccgcgttaacttttgcacaagttaatgcaactgcggatgatgctaataacatctctaaagcaaaagcttataaagtggatatcactgaccaaaatcaaattatcatggacgcagaagctaatgaagggatcggtaagtttacgagtaagtatgcaaccaatgaagttagcctgttgatccctgctggtaacgcggctggcgcttacacttcaaccttgacatggacattaggtaacgcccctagctaaccagttaatgcgccagaggagaactgaggtgtgaccgatgaaaaagggattgttggtaacaggtcggttattaatgactgtgataggttgtctcatcattagtaactggggctggtttatcgcaacgcaagctgcaacgacacagtcacaggtgcaggtagaaatgaccccctcggatgatgacaatgcagtttctccggtcgaccctgatgatcccagtaaaccatacccgggtgacccggtcgatgaagacaatgtcgctggtacgggctcacggggaaagttaaccattgatttcgtcagtaatttgaaattcaatgcaattacgaccgcgggtgggccgtttaagacgactgccaagaatgagcgggcgatgattcaaataactgatcgccgcgccacggctgctggatggacgttacaggtcacgccaagcgggttgcaaagtggtcagcagaccttaacgacgtctttaaaattaggcgcagtccaattacggcccggtgctggcaatgttagtactgcacctaacgttgttaatactggtgaattagttgctggtttagcgaataatgtcgtgattgccccgcctaatactggtctaggtacttggctggtcgttctgaatcgcgggcaggtacccacggaacttgaagtccatgatcgccaattgcgtgctggcgactacacgggtacgctggcttggtcattaacgaacgcacctagttaattaaatggtttgatgtgaagctgctacttgtaaagaatggcagcttcaatcatacatagctcgtcacttaccgttgaataaaggaagggtaaagcctatgaaaaaaatattttggcagttaattgccgttgtgagcatcgttatggcaggtttgacaatgactgctagagcggatgacctcaattacacggtccaggctgatttgcctgataaccaaattaatcaaaaagtgtcctattttgacttgaaggtcacaccagggcaaacgcaaaatctcactttaaccattaaaaatagtgatagtaaagaacatcgatacacggtatcacctaatctggcggttacaaataataacggtatcatcgattacagccaagcaaaggctaaggccgatgactccttgaagtttaacatcaagacagcactttcaaagtcacaggtcgtgaccgttcccgctaagtcaagcaaaaaagtcactattaaattgacggtacccgagaaaaagtttgcgggcgtggcgctgggtggaatcaatatcatccaggaactcagtaccaaggcgaaacaatctagtagtggcatggccatcaataatcaatatgcgtacgtgattggcttgcagttacgtgaatctgatccaagcggaatcaaacctgtgatgaagttgcacgcagtaaaagccaagcaacgtaactatcgtaattacgttacggctaatctgcaaaacaaccagcccgttattatgcatggcttaaagatcaaaagctacgtgactaaagctggttcgtctaaaaaattattgacgacgactaaggaaaacatgtcaatggcgccgaatagtaattttgactttgcagttggtgacgggacgcaacaattgaaggcgggcaagtacactttacatttaacggcaacggctgataagggtaagtggcaatttacaaagaactttaccattactgataaagaagctcagactttaaatgatacagctgttacagaaaaacaatcgaactatttctggtggtttgttgcgttgggcgcactgattgttgtcctattaggcgcaattatctggctactattgaaaaaccgccgtcgtcaggactaactagcgagaggagttttcaacatgtggaagggaccgaaacaaatactagttgcattaactgcattaatgggattatgggccgggaccgcccaaattcaggctgctgacgaagcgacgttggcaacggcaccgtctggcctgaatcagttggataaactctttacgctaccagcggcattcagtagtggcattagtaatagtgcgaatattgggaatgtgaccaatgcaagctcgccaaatacgcaggccgttcaggttattaacggcaagaagcaagtgggtggcttttggtcgaacgacgccaatcgcctagatttaaataaagatgctacgtttaaaatgtgggtgtatttgggaacatccacgagtactagtaaggccggcgatgggatggcttttgtcttacaaaatgatccaaatggtactgccgcatccgcacaagtcagttcgtccagcattattggtgagacactcggtgtttggggtgttgatacggataataaattgaaggacggcgaagaatttgcgaaaacggccatccaaaatagttgggccttagagtttgatacctataccaatacttcaactagctatagtaatgctggtaatggtgattcgtttgatgatggtattaagaaacaacacattgcgaccgggtatcctgggctggctagtcagtatgaaaatcagtctgtcaggagtttagacgttaccgggataatttggtcaacccggtactactttacgcaaaaacataccaacctagtgacgaatatgtcattaggagatagcaagtggcaccacctggtgatggactggcatgcggcgactaaaacgatgacgtacacttataatgacatcaatccagatgggtcggcgacgggtagcggctttactcagagtgaagtgttagatactagccaattcaacagtagtgatggcctggttcgctggggattcatgggggcgactggtagtaattctggtaataacatggtcgtgattgaaagcgcgccgaatttagttgacgtacaggcggcggttaaggttacggataagaccaagaatcgtgaaatcaagacaggcggccagctcaaagctcagcataaagttcagtacgactatcaattgacttaccaaggtggtcaaattgactgggataacattacggctgaactcaatctaccacagcatattacgtttgacagtgccaaggtaacgtatgcggatggtagtgagcagactttgacggcgccaacgagtagtgatactaaagttgactatactctagataaagcagtatcggctagtcaaccgaccgcgacgatcacgctcaatgggacggccgagaatgtcgttgtcaatgaacagacaactgcaacgacggcgacatttaaaaataaggtgtttgaaacaacgacggaagcaccggattatatgattacagtcgatcagccgctataccttaaaattcgtaatagtccgtatactgtcgccaatggggaagacgtgatcatcagagggattgttgcagccgaggattcggaacaattaactaacggtcaagtgacactacacccaacgcttaatggcaaggaaatgccaacggttcaaatgtcggatgatgacgaacaaggttacttctactacaaggtcaaagcagaggatttacacgtcggtgatgacaatgagattgaactatgggcatctgaccgttacgagaacgtctcaccagttgataaagcgcagattattgttactgcaggtgaacttggttttaagacggttgccaaaagcagcacgtttaaaaccattactttagatggttcggctcaaacgacagaccgggaagacgattggcaactagttgtacgggatagtcgtggtaagggctctagttggcaactacaagctagtgcgactaattttaaaacaaccggtggtcagaatttggcgggcgacgtgattttccgcgacggcgagcagacgaccacgctgaattctgcgggtacggtgattgacagtcacacggctactagtgataacgatgattatgatgtcttggcagactggacgaataagtcaggcattttatatcaaagcaatgcgggagctactccgggttcttacacgggggatattacgtggacgttaacagatgcacctaagtaatgatcgggttggtataagagaatcaaaagcactcacacgcaagattgtgagtgcttttgctttctagttattagccataatggttaaagataataataattttaattaccacagttaagtgaatgaataatcagcctgaatgactgagaacgttgtaatcaaggcatttttttatcgtgtgattagtgaagtatttacactttttttacgtgtttttggttgcgttttctttttactttagtacaatgtaattgttaccaaatacatgttgcacaagcatgattgtgaatataaacacatttaaggagcgatttaaaaatgaaagttattgtaattggttgtacccatgccggcactgctgccgttaatcagattttagcatcaaatccagatactgaagtgacgatttatgaaagaaatgacaatgtctcgttcctatcctgtgggatcgcactttaccttggcggccaagttgctgatcctcaaggcctattttattccagtcctgaacagttagctaagttaggcgcaactgttcatatgcaacatgatgtgacggatgtgaatactgacaaacatgaaattacggttactgacttaaagactggtgaatctaagactgatcactatgacaagttagttgtcactactggttcatggcctgttattccaccaattgacggcatcgatagtcccaatgtctacttatgcaagaactggacgcacgctcagaatttatgggaagcagccaaaccagctaagcgggtcattgtgatcggtggcggttatatcggtactgaattagttgaagcttaccagaagcaaggtaaggaagtcacactaattgatggtttaccacggattttaaataaatacttagacaaagaattcactgaccgggttgaacaagactttgttgatcacggtatcaagatggctttgaatcaaatggtgcaaggcttcagtgatgatggtaaagaagttacggtcaagactgacaagggcagctacacagccgacatggcgattctttgtgttggcttccggccaaataccggcttactcaagggtaaggtcgatatgaacgctaatggctcgatcaagaccaatgactacatgcaaacttctgatccagacatttacggtgctggtgactcggttgctgttcactataatccaactaagaaagatgcttatatcccattagcaacgaatgcggttcgccaaggaaccttagttggtttgaacatcttcaagccaacgcggaagtacatggggacacaatcaacttctgggttaatgttgttcggccaaaccatcgtttcatctgggatgaccctagaacatgcacaggccgaaaatgttccggcagccgctgtcacttttgaagacaactaccggccagaatttatgccaaccactaagcctgttttaatgcaattggtttacaatcctgaaactcgcgaaatcctaggtgcacaattcatgagtgaacatgatgtttcacaatcagccaatgtgatttcagtgatgattcaaaatcacaataccattgacgacttagggttcgtagatatgttcttccaaccaatttacgaccggccatttaactatttgaacttacttggtcaagcagcgattgcccatgcggccgaagctgtcactgaataataagttaaaataacgcgatgcttaccttgcttcatgaaggtagcatcgcgttatttgtttattggtgataattgaatgttaagtggtcggtggtactaaagttaaggccagccagtatttgtgccattaggtcatcgtgctttggtaaaatcaatgtgagtcggttcaactttaactcaacggtaccaaatgccaccaaccgttctaagatttccctgagcgtagttacttgctgataagtagcagtcaggtcaacactgagagttgcttcatgcttagccgtatcgattggggcaaagccgacctgaccgacgaacgcgttcgtgtctcgatccgttacgccccaaacaagctggtggtcatgaaaaatctcgcgcatggtgtggttaatttgtgcagcggttgtttccatagtggctgtcgcattgctggtctgatataagttgaaaacgtcgataacgcgcacctttgttaaccaatcgaacgtatagtgtggcgttagaatgggatgatacttttcaaattgtgacatagtgcctcctttaaaatgcgtcatgaatatttagtaattcctattgtactagttaaactgttatgaatcatgattaaaacgtgccattttttgagttcaaaatcagccagtttaggttcgctggaaacagttcgagttagcgtaaacttgcttagttagttcgtcctacgccgacttccaggcatttctgccaattgccggaacgcagtggacacagatttaagccgaagaccacgtcttaaatactggtcttccactaaccaagccaaggacgcttgctaagtggaatttcaccgctgagcattggccgaaacgccttccagtcgggacagtattcgaatggcggacatgtgcgtactcagtttttgatggctttgtcgttgtttcttataaacagtaattttgtcaatcaactgttaggctaaaaatgatattgtgatagctcgttattctgaatcgccgtagtaacaactgaacgttttggcaaagtgaagaaggcactctgatatttcacctaaagttccaatatcaaaatagccaacgacaaattgtaccaagttaagtggctgttcatctgccattcgagcggcttaccgaccggaggggttgggtgacaatgctcagtagccaaattattcttagtcggaagtgggttgcttccggcttagaataagactcgtatttgagatgacgcgggctgggcgttagctcaaatcgacgtcggcttacgttccagcaattgtcacccagccccggaggtcggaataggacactcaccggctgacgaacagtaagccaactaaatggcacgttttaatcatagttaatgctagttgttttcgatggttaccagtgtccaaatatgctgatttaagcgtcaagtggactgggattgccttgttgatgaccctcgctgaaaatggcgttaggtcgactaataacgcgtctgctggtgtgatttgcggtgcagtcgtgattgagactgggtcacagtccaataacgatgtaacggcatcagacgacagttctattgtaatatactaacgcgtaatttgaatgaataagacccataatgatggaacagataaaagaccgactaacaagcaatcgcaccgcttgttagtcggtcttagtgttcattgattaaagctttttaccagattttgacccgcttatctggtgccaaatacatggcatcgtcgggttgaatgtcgaaggttgtgtagaaatcatctaagttcttaggttgtacgtttgctcggagcttagctggagcgtggacgtcgattgaaagtaagagttgcatgtattcagtcgtggccttcatacgccaaaccatggcccagttagtgaagaacgcactcaaatcaacgtcatcttcgcccttagcagcttcttccgcgcaacttaagcctcccgcatcggcgatgttttcggatacggtcaacgtcccgttaactttcgcaccagcaaagtctaagccatcgaattcactgatcatggacttggcaagttccttgaagtgggcagaatcttcctcggtccaccaattatgcaagttaccgaattcatcaaatagggcaccattgttgtcaaaagcgtgcgagatttcatgagcaataactgcaccaataccaccatagttagcgctagaagattgttctaagctgtagaaaggtgcttgtaggatagcagctggaaagacaataatgttcataaatgggtggtagtaagcattgacggtgtccgcactcatttcccaacgggtccgatcagtggcttcgccccactttgagaacatgtcttggcgtgccaaacggttaaagtggaggacattgctcaatacgttgccaccttgttcgggcgtgtgcgtcttgaatttcgtgtaaatcgtttctagtttatcagggtaaccgacttgaatgccgagtttatcaagcttggtcacggctttagcacgcgtatctgcgctgagccaagtgttcgcttgcaaccggcgtttgtagacggcaatcatcttttcgaccatctgatgaacgtccgctttggccgcttcaccaaaatacttgtggccgtaatagagtccaacgacttgatcaaaagttccggtagctagatagtaggcactcttagcttggttccgcggttctttttgaccagacaatgcccgtgaataagtcgtggctaatacccgcatttcatcactgaggtaaccactgtaccgttgaacgagtttagctttcatccagttcttcatcagaccgaagttatcaggattgactacttcgttaaagtgatcgaagaaggcgggttctggcaagatgacgaggtcgggattaccatcgatgacggagtaggtgatggcggctaagtctaaataacgactagtgttaacaaaatcgttgaatttgcgaggattatacatcttactgtaatcagccgactcttcagcggatttgatccacggaacgatcaaacgatcgaattgcagcgtgtcatcaacgattttttgtgcttcgtccttttcgtaaccagttttttgcaacagttcggtcatcattttagcgtaaattgctagtaacttagggccggcctggttgccttcgtcgtagtatgtcttgtcgggcaagatagtcccaggtgcttgggcaaataaggcgttgaccttggtatttttcatatcagcgtcgacatccaagctgaatggtaatgggaggccgtcgtagatccaatcgggcatccgttgttgtaagtcagcaaagtcgcttaaactatcaatttgcttgagacacggcagaattggttccgcaccattggcattgcgttggtcgaaatctttagctaagcggtaaaacttaatgaattcggttagctgaggatcgtcgggggtaactgttcccgccgccattgcatcaaagtcatgcattaacgttttttcaatggcatcaactaagtccataaagcccccggttgaagaatggtcatccggaatgacggcggttttgagccactcgccgttgacggcatcgtagagatcttgttttactgctgcttgattaatggttgccattaaatccactccctaataaattttctaatactaagttaattataccttagattattctcagtggtatcatctggtaccgactcagtaaaaaatgatactaatcatcttaatagtcctgaatcagtagctgatgggttgtgaatgttaatgtaaaggtcaagattacttctgaattatcggcatgcaggagctgttagtgcctgtaaatcaccttatgaggcagcgtgatggttgacgtaaaagcccccggatgactaacagtgatttcgctagtcatccgggggaagggataatttaattagtagtcattattcagttaataatagctggtcggcatcgttaatttcgatgaccttgccaggcttttgcgtaattaggccttgacgctcgaataaggcgagcttacggctaatgctttcaggggtggtgccgaggaacgtcgccaggtcctttttctttaatggtagtttaaacgtgtcggttttgagcgctgccgctgtttcagtgatatagttcgctaaacgggcttcgacggattcagtggccgtgctggttgtttgacgctccagttgactgagacgtttgccaaagacgtttaagacgttgatgctgatactgggatatttttgcatcaagtcttgaaagtctgaacggcgaatactgcaaacatccgtcggtactaaggcttcaccgaatgaggttcgccgttgattttcaaataaggcagcttcgccatcgatatcaccagtttgtaatagatatagtaactgctcgcgaccattggcagctagctgatagactttaacctgcccattggcaacaatcatcagtgaatccagtggatcgtcagcaccaaataaagtgctgccggctggatagtggtggtgacgaacgatcgattcgatagtgtctaattgttcactaccgagttcgctaaaaattgggactaactgcacacattcatgttctgccataaggcccacctcctgaataaattcaccctaactataacagattttgcttggtagatagggtttgacgttttaaatttcctactgttttaataactatattgtagcgtaaaacttttttgaatttcttgacggccgtcaagttctggtcaatcaaatccggttatgatagaaccatcaaatgaacgacacggaggtaattgattatgaaaattattatgcaattaggaacgttgacttgcccatcatgcatgaccaagatcgaaaaggccgttgctaaccatgacggcgttgagaatgttaaggtgctattcaatgccagcaaggtcaaggctaactttgatcctgaagtgacgaatgccgatgatttggcacaagttgttaccggacttggttacgaagttgaaaacgtcaaggttaagtaggaggaataaacgatgagtgaactaacgatcgacgaacaatacgcagcggaattaaaacagagtgacattgatcaccatgtcccaacagcgggcgcaatgacgaatcacattttatctaacttaatggttgcttacgttaagttgacccaagtgaagtggtacgttaaaggaccacaatcattggcattgcggacagcatatcaacgtttgttagatcagaatgtccgtcagtttgctgaattaggcgaattactcctagatgaaaaccagaagccatcttccacaacggctgaattaaccaagtattccatgttggaagaaaatggggctttcaagtatcaatctgttgatgaactcgtggccgcaacaatcaaggattttgatacggaaaacctattcgttgaccgggctatcaagcttgctgaaaaagaaaaccggccggcactggcagcttggttagttgcttatcgtggcagtaacaatcgcaatattcgggaattacaagcttatcttggtaacgatgctcgaactggtttggatgaagaagatgaggatgacaacgattaggtcgttgtcgctgaagaattaaacgctctggatagcgattgtgtgggcaaactatccagggcgtttttgctattacaacgggcctgcgctatactaacgacaattaaattatatgggagggcccgagatggcgattagcgatattgtgatgtggacatttgtctttattattgcgactgggttcgtaacggtggtttcaacggcggtactgttgaagcgagcaaaacgagcgcccaaggatgccgagcagtcccacagtgatgacgacgatgactggaaaaaagatgattggaaccatgatgactggaaaaagggcgattggaaagattgactcgataagttgcctgacagatacggtgcttaactgagtcaactggcactaaaaagacggtataaccaactgagattggcgacaccgtcttttttggcgttatttggtttttagcagtagatccaaggagtgttcaagattctgaacatcagccgtggtcatcgcatctacacaattattaatattacgggcgatgacgagtttcatggccttgtcgatacttgatttcactgctgaaagttgaactaagacatcttcgcaaggacgattttcgtccatcatacgtaaaacgccgtccagttgaccagccgagcgtttcagccgggtcttgatctgcttgctagtgacatattcttcagtagttgccatgattcatgatgcccccttcgtaattaggcaagtacttttttgagttcggcttcaaaatcaggcttaggacgtgctccgaccatgtgactgacgacttggccatctttcttaatcaggaaggttggaattccttgaacttggaattgactggccgtagcttggtcatggtcaatgttcaatgaaacgaagttgacctggtccttgtaagcggggtcttcagaaagggacttaagaattgggtccatcatgcgacatggtgggcaccagtccgcgcgaaaatcaataacggcgataccagtatctgtttctttggcaaaatcttgatcatgtatttctttaatcattttagttgactcctttagtaagtatttgtcactaaacaatatacccccataggtatacacgagcaagtattctgcttctggccgtggagggatttaaaaaggactgatgtattgggtaattagataataacgatttgttgtggaagctagcgtcacctgagaatcttctagttgtgatcgcgagcattaacgttgaagatctcatgttgacgcgagcgtgttatactagcgcttcataattatacaacccagggtatctggtagaattatgttgaattattagaaaccgcttatttaagcaaaataaagcgtttacataaacggttttatctggtatcttcaaattatcatagatgctcggtaccttacgaggaggatttacagatgacaggttcatgggaagcacgctacgccgctgaattttttggcacgctgatcctagtactactaggtaatggtgctgtcgctaacgcattcctgaagaacacgactggtaacgatgatccaggactcgccaatggaggatggctcctggttgcatcgggatatggactgggggtcatgctcccagccatgatgtttggctcgatttctggtaaccatttaaaccccgcgattacgattgggcaagccgtgattggaatctttccctggacgcacgttgcgccttacttacaatttctaggagcaattgcaggccaatgcttgattttggcactgtactggccccattatcggcaaacgactgataatgaggcagtcttagggacgtttgcaactagtgatcatgcgaacagtcagttaaacggttttgttacggaaatggtaggaaccgcagtcctgatttttggtgccatgggattatatcgcgggatgttttttcatcaaaatatcgatatcgccaatattggcgttggacttttgattgctgccatggttatttcgttaggcggtccaaccggtccgaccctaaatccggcccgtgacttgggaccacggctagtacacgcgttattcccagtaccgaacaagggtagttctcactgggaatatagttgggttcccgtggttgccccaattgttggtgccgttattggaatttggatttataagatcttttttggtttataatcgcaattaattaaccgagcgtatttatgaaattattattggtctatcatttttgattgcaatatgataaaacggtccgccgactagctggggaagactagtcggcggaccgttattggttgctaggcctgtaaccaagttggggagacttgattaagctgtggctgcttgaatggttttagttggttggtgtttgtcgaacttggtttggaaattgattaaccgcatagcgttgaagataacgactaagatactagcttcatggacaaacatcccactggccatgtagatataaccgaagattagcccaatcagtaggaaggccacggtggcaatggcgatgaagatgttttcacgagtgttcaagacagtcttcttggcgagaccgtgggcgtgtactaatgcggggaagcttgattgcatcaagacgacatcggatgtgtcgatggcaacgtcagtcccactacccattgcgattccgatatcggcgttagcgattgaaggactgtcgttgatgccatctccaataaaggcgaccgtgttaccggctgcttttagtttcttaacgtattcgactttttcttctggtaagaggttggcgtgaacttcatctaggttcaattcgttggcaacggcttgagcggtgagttcattgtccccagttaacataacgagtttcttgattccttgggcttttaatgcggcgagggaatccttcacgcctggacgaatcgtatcggcaatcccgaagatgagttgaacttgtccgtcgactgccatgataacggttgattgaccaccagcttgtaaaccattgagatctttgagttgggtaggatttagtttgatattatgagccgtcaacattttttgattaccaatgacaacttcttgttgaccgacttgtgcacagattccttgacccttaacggtttcagtgtcatctaggacgggagagacccccgctgactgctggtcggcataactgacgattgcttggcctaacggatggtcggaaacgccctcaatagcggcagcgagagctagttgattatccgcgttgtttgtgtaagtgtgcatggttgtaacggcagtgttaccttccgttaaagtaccggtcttatcgaagaccagggtatcgactttggcaaaagtatcgacgacttcaccacccttgatcaggatgccgcgcttggcaccattcccgattccggcaacgtttgacactggggcgccgataactaaggcacctgggcaaccgagaaccagtaccgtgattgctaagcggaagtcacgggagaaggcgaagactaagactgctaaaacgaggacggcaggcgtataatattgagcaaagcggtcgatgaacttttcagctttggacttggtatcttgagcttcttcaaccaattcaataattttggcaaaagtcgtgtcgtcgccaacctgagtcgctttgatcttcagatagccattttcaaccattgttcctgaataaaccgaatcatcgagttgcttgttgatttggcgtgcttcacccgtaattgaggcttcgttaaggtaaccgttaccttcaacgacgatcccgtcaacgggaacctggctcccggttttaactaggacaacgtcaccttcgtccacatcatcaacgtcgacttcttcggtgccatcatcagtaactaaagttgcggtagttggtgacatgtcagtcaagcctttgattgcggtccgcgtcttctgcaaggtcttgctttcgagataggagccaaacaagaagaggaaagtaacgattgcggattcgttgaattcaccaataatgaatgccccaatcactgcgatactaactaacagttcaatactgaaaactttgttccgaagtgcgctccaagcacgaaccgcaatcggaatgacggcaataattgaagcaactgctaaaatgacttggtaaccgagcgtaaattgtaagagatatttactgagcatcccaaggacaatcagaatccccgtaactaatgtaatttgattcgtatgtttagtgagaaataattggaatttcataatttgcaactccttatttgatttgatgaccctagtatagtgagttcagcttgatggcaacttgataggcgtcaagttttgcaaaataacagtattaattctggattgctggcagtgattatgattaaaacatgccattttttaaattcaaaagcagccagcttagacccactggaaacagttcgggttagcgtaaacctgcttagttcgttcgtcctacgccgacctccaggcatttctgccaattgccggaacgtggtgggcacagattcgagccgaaaaaacacgtcttaaatactggcctttcactaaccaagcaaaggacgcttgctaagtgaaatttcaccactgggcattgtcagaaacgccttccagtcgggacagtattcgaatggcagacggagatgtacccaacttttattggactcatcatttttctttataaacagtaattttgtcgagcaactgtcaggtagaaggtaacattttgatagctcactatttcgaaatcactatagtaataatcgaacgtctcgacaaagtggttaatgtaaccttaaagtctcgtttaaaattccattatcaaaatagtcaacgaccaattgtaccaagttaagtggccgttcatctgccattcgagcggcttcccgactggaggggctggatgacaatgctcagtagccaaattattcttagtcggaagtgcctttcttccggcttagaataagactcgtatttgagatgacgcggtttgtgcgttaactcaaatcgacgtcggctgcgttccagcaattgtcatccagccccggaggtcggaatagaacgctcaccggctgacgaacagtaagccaactaaatggcatgttttaatcatgtttcatgacaagttaacggaagaataggtaggatgatcaagtttgagtaaacaagaggtataggagggaaaaacgtggattatcaaataacgcaggcaaatcagcccttgatgccggcatactttcaggggcgttgggcggtcaagcaaattgcggatcgagacgtgatgtatagcactaatttgggtgctgaaatcgattttcaagtcactgatgctagttttgtgcggttgacattcttgccgttggcgtatgagctaccgagttgggtggcgattcagattgatggcttgccttttcaacggcaggcggtgacgaatgaccccctatggttgacactggatggtcggccccacgtggtacgggtagttttgagtggtaatactgatgaggaccgtgtgtgggatggcaatcaaggttttgcagtgaaagccctgacgacagatggtgagttacagccagttcagttaggccgacacagcgtgacgtggattggggattcactgacggccggctgctgggtcatgggtaagcaacctgccgaagattatcgcgcggaagctaactatgcggcggttgcgagtgacttgttgaatgcacggaatgtccgcattgcttatagtgccgttggtctcagtaaaccaggaactggtggcgtaccggtactgccggaggttttaacagccgtggatagtaaaacgacgtggcaaccagtacccacggatttagttgtgattaatgtcggtactaatgatcggcatacggatgatacgacgttcacggtagttttgcgccgcttccttaatcaggtgcaggcgctttacccgaatagccggcttgctgtaatgatcccgtttaatcagaattttgcagcgattattcgtgcggtcgtggccgaatttatgcaattgcaactcattgaaacggctacttggcaactcagtaccacggacggggtgcatttagatttagctggctcccggatggcgggcgaattaacagcacaagcgttgcggacacagtatccagatgtttttaaatcgtgatcaacccatcttataaaaatcccgttttactgtagcaatgttctgctgcagtgaaacgggattttttggtggcactactagattttaaaaataaacgttaacgctggcggtgtagtgattgcgactgtaaataccgggccgcagcgagcacttcttcgggaatatccacatgggcgatgaagccctgaccacggggaccataaccggtgggggtatccactaggcgttgaaattcaccgagtaagagttcagtaaaataagcgggttgccagccagctactattgtgtttggcgtaaagtgcattggttgtagccggtttaattgcaaggtcgccggcgcatagcgaataaagttggcattgggccaattggctgagaacgttagggtagtccgccgcgcgagtaacgggtcttgtacgagtagaacgtggcgccaatcggtgggggctaacgcgcgggcatgcgtggcattgctaccggtattggtagaagtcttgtcgaggcggatactaccttgatagccagtctttcgaacaagcgtcgccatcaactcagcctcactaacttgagattttggcaggtttaagttttgccgcaaatacttagtggcgtggccgataccgcccgcaataatgagtagtggtaattgatagtcttgggctaactggcccgctgcagtggctgttgctgggaggctgttgccacaaaggaccaggccatcgaggtgctcaggcaaggcggtggtgtgtgtcaaccaagccagacattgattgaaagcggtcagttcgtccaattacttggcctccttagtcccaaagtgagccgctgcggccccaaagttgaaccgttggaagtgaacattttgaaagcctgcttgctgaaacatcgttgctaattgttgatagcttgcaaagtgacgagtggtttcctgtaaataagaatattcctgatattgatgggcgaataagcgcccgaatagtgggactacttttgtgaaataccactgccagactggtttaatcaatggttgatcgggttgagacgtctctaagcagaccaagcgagcccccggttttagtacgcgataaatttcagttaaagcttgggctttatcaggcaagttgcggagtccgaagccaatcgtgacgaggtcaaaggtgttgtccttaaacggaagatgcatcacattgccgcggcgcaaccagacccgatcggcaaccggttgctgggtcacttttttttgtgccagttttaacattggggctgaaaagtctaatccgatgacttcaccgggtgcctgtaattctttagccagcgcgatcgtccaatcacccgtaccacaacagaggtcgagaacatgggcgttaggcgctaaatggatttgggccatcgtttgcttgcgccaatgacgatgcgttccgagactgatgatgttattcatccgatcatagttcggcgcgatggtgtcgaacaaaccttggacattatgtaaatagcgatttgccataaatgatacctcctgatagttgctttacttactactatagcagatgttagttgccagttaccgtgaaaaggaatgataatcaatataaagctacgatattgatttcgttgctgttaatattgttcgtgaataaaccgttaaactaaagttaaaataacataaaggcagtctcgattggtatttattaagtaccaagcaagactgccttttttgacagcgcgttcctaatcgaagccttaacgtcaaaacgagtacgctagtaatagcttaaaaatcatcatctgcaatttgagctaacaggtcacgtgatggaatgaagaacgcttgtccggatagtaaggtggagaaagttagtaaaaagtcactttggtcgaccatgttttgcagcatgcctttggtaaccgtccagtgacgggcataaccaatgaagtacgtccctgtgttaccagctgctggattggagtacgggacattcatccgaacgattttttgttcgacaccatcaatttccaattttgaagcaacgttgtgagcattcttaaacttgtctgcgtcttctaactcgaagtcgctgaatttttcacggcccacggctttttcctgatcctcggtgtgcatatgttcccacacgggcatatcatgttgccatttctgtgcaaaggcgtaagaaccgttgatgaattggggatcttcgtcaccaactaaggcataatcagcggcatcttctacggccggcgcttccgtaccgtcgataaagccaatgatggcccggccctcgaagtaacgaaagcccttcgtctcatcgaggacggtcgtgattggcgctaaaacccgctggaactgcgtttggcattcgtagacgaccgcttcgttgcttgcgcgaatgtggaagaagaggtcgccgggtgttgctggcatagtgtatttgggtccacttaaggtggtgtaagtttctaattctttaggtttgggtgccagtttcaggtttggcgtctcggatgcgtaacgagcgaatgatggcttgtgaccgatctgcaaattcttgaaagacttcacggtcgtgttgctgatcctgacgatttaattgaagaacggtaaattgaacgtgttcaccgacatctttccagacatcttgggcgcgatttggattgatttgcatggtatatttcctccataaattgtttgatattgttagtgtacatggtggtacggttagcgtcaaataaaggcaaacggtgggtgtggataatgacgacattcgccagcatcaggggtaggcggccaaactaacgtggtattaaaacatgagtaataatgattatcaaataagcgcaaagctagtttcaaatttgaaactgtattagtgggtcctgtgagctatagctcacaggacccactaataatttaacaaaaatgaaactttatctgtcctaattgcggataattgtaattaaatatctgtgtaattactaagtaacttgtaattcatcgtttttagtaagggatagtttgagacatttagacggctattacaagtatattaataactaaacggattagtcagttggaattgttggtgcttgtaagacattaggaattaattgaataaatagccggtaagtctcaattctgctgagtgttggctgcgtggtcgcaagttgccaagctaactggtgaagacagttgccaagataggttgccataaaatgccgttgcttaggatggatggctaagctagttagcagctgttgggcaaaaccaacttctaatgggatgacccgatcgcgacactgtgcccatgacacgagtaaggggagatccagatgtgcgcgaagcgtcgtgacgattacaccagcaatggttgcgtaagatgtggtcgttaagtcatttaacgcttgtcctaactgttgtaaggcaattaagtattcaatcacgatgatatcttcaatatcctggtgatgacgataaaaagtggcacgtccaacgtgggcatccagacaaagttgtttgacagtcaactcgttgaaggtcttttgagccttgaaattcgcttgcagggcagtaatcaatttacgatgagtttgatgagttcgctgatcaatatgcaattgattgttcataattaattttgtcatatgtcaatgatacaccaacttgtgatatgtctcaaaacgtcccttttttagcatgtgaaagcgtctataatagctgtcacagttagatatagctgaccaattaaggagattgtcgactaatgaaattaattaccgttgaagagcattttgaatcggcagctgtgactgccgcaatgcgtcaagctgttggtaacgctgcgttaccaacagttagtccagcgctacgccagtacatgcgtgacaatttaccgagtcctgcaattatgcaagacacccagcatgaacgactggcatttatggctcagtacgcctgtcgttcatctgaatggtaataaggcatacgtggaactaccaactacgacgcatatgcgcatgatggtcaatggtactttagcggaattagaatcatatcggcgactgatttaccgtgtcgaacgccgtgatactaagtggaagattagtcgattgacctcaattaacgaaagtgataatttacgaccagtcattgcgggacagaatttacacgtgatacctcaagattttaacggtttacggccctcgtatcaattcctggcctatgtccgacaagctgccggtggtcaaattagtcaggacttattagggacggatcgaccagaagaagttgagcgattgtacaaggaaacgagtgcgtggttgcgagctggagtatagttgaaggtaaaataaaaaaagcgatatcatgtaaaatcaaatacttttagcaccttgtaaccagcaataaaaataatttagtacattcgttaaaacaacagaccgttactttgataaacacaagtaaatgatggtccaaaaaataaggtgtgttgtaatcaatttcgattgcaacacaccttaattttcgacgtctattaatatggaccctaccggatttgaaccgacgacctcctgcatgcgaagcaggcgctctcccaactgagctaagggcccaatacaacttttagtataccgcaaaatgctagtcgtgcaagtctagtttcgttatcaatggcggctagcacgatgattttgattaccacgaattttatgcactcgtcgtttgtactgtgctttttggttgctgacaaacttgaagtgttgcattttgccgccgaaaacttgcccattcagccttaattttagccaatcttgcatgacggccatcattgaattaatttgggtgatacgtaatttgtcgtgttgttgttgtgctagtggtaataaattagtagctaactggttaactaatttctgatggtaggccattaattcgggtgttaatggggcatcagtataagtattaaataatttttgaattgtttgaagcgcatctttgatgtcggttggttgataataacgatcgtctgtattcgtcaagttaatttcccctttgtcattttagtatagcaaattttatttaaaaagcatggtttagcgtggtcaaagtcagcgatggcggttacaatagggataaatttaggaggtgcgcatcatgaccacagtaaccgcattggaaactcaagcaggccaagtcttggatcagtcctacgcccagtttaaacaagcccagttggcgctgggcaaagagcagatatttgctaacgctgctcagatttttactgttggtgaaattgctgctgcgacacggcaatatttatttgacgaagagatcgcacagcaagtgatcaagttgcaagaccaggtattaccgaccatgtatcaacagggacaaagtggcgaattcttgaagttgaactttacgggtaatgatattcgatggctattaggattaccgcgaacgcatcatcgccaacgaatatctaaatagtccaaattaaccgaacgtttggtcgtaattaaattgaaatttaaccgaatttccaggaattgtcactggaaattcggctttttaaaataaaaataactttttttcgtcaaagttgctaaatggtctcaaattttagtaataaaacgatgccgatatgatagggtttcagcgcggaaatgttacgatggctaattattgttacggttttgtaactttcgtaacatattgttattttgctggtattggtatgtaacacaaattgagtagtatagacgttggcttgaagtacatacgtgacattctttttggagtgatcattattaaagtgaaagtaaatattaaacaagtgatgttaggaactgctgctttagctggtatgttagttactagtcaagcagttgccaatgccgattcaatgacaatcaaagcaggggacactgtttgggcatacgcacaaaagtacaatgtttctgttgacaagattgctgaagctaatggtttaagcaatcctaatatgattattgctggtaagaccatcaatattcctggtgttaagaccggtgaaaaggttacggctaagaagaccgctgctagtgcaagcagtgccaagtcgactagtgctgcaacttcaacgagttcacaagctgctagttcaactactagtgctgctgcaaccagctcatcaactactagtgcaagtagtacgagccaagcagtatcaagtagctcagtagctgcgcaatcgagtagtacttcaactgctagtgcaagcagtgtaacttcaagtgcttcaacgagttcagtagtttcacaagctagttcaagtgctgtaactagttcagcaacttcacaaagctctgctagccaaagttcagcttcacaagcatcacaaagctcaacttcagtagcatcgtctactagcacgcaatcagctgctacttcaacgagttcacaagctagctcaactgcaagtaacacaacaacgaacagttcatcaacaacgactgctgctgcaacagcctaccgtgcttcagcaacaactagttcaactgcatcatacagttcagtaattgctgctggcaagactttcattggcacaccttacgaacaaatggattgctctgcattcacgcaagctgcctttgctaaggttggtcgttcaattggtcggactacttatgcccaagcaacgattggtactcacgtatcattcagccaagcacaagctggcgacttggtcttctggggttctgattcagcaccttaccacgttgggatttacttaggcggtggccaatacatcgcatcaccaacttaccgcgaatctgtttcaattaagagcactgcttactatacaccaagctttgctatccacatgtaattaacgttccttaaatggacaaatagcatcatcttagttcgtcagaattaggatgatgctatttttgtatgcgtgagcgatattaattgttttctggagtttggctactttattcaaaataacgtgatgatttagtgtgtgaatccgtatttcttaggtgccgcgtcatgatgatagacaatgtgggcttggtttaagtcatggacagccttggtcaggtcatccatgaaatcgtgggccatattcatgccaaagtcagcccgaacgacgattcgttggatgacttgttgttccaggttagcaggtaaaggatacgttggtacttgccaaccgttcattaataggcgatccgataaatcataaagggtccattcgcgatcttcgcgcggggctagttggtaacaaatcagagggagttggtgtccgttattgatcatcttaaactcaccaactttatccagagcggctgccaggtagcgggcaacatcgtgagtctttgtttgaatctcgcggtaaccgtccataccgaagcgaatgaaattatagtattgtccaatgagctgggctgcgctatgtgagaagttgatcgccattgtcggcaactccccacctaaataactaactttgaagactaattctggcggtaaaaactgacgatcacgccaaacgacccagccgaccccgggataaactaaaccgtacttgtgcccggaggcgttgatcgaaacgacgttagccaaccggaagtcccagatgagttgcggctcaataaatggggtatagaagccacctgacgctgcgtcaacgtgaatgtagactggtaatttgggatgctgatgattgtagtgagtaacgaccttatcgagtgcggctaggtcgtcatattgaccggtataagtgatgcccatgataccgacgataccaattgtgtattcgtccacgtagtctaagacgtggttaacgtcaagggccatgtgttgctcatccattgggaccacgtgtatgtcaacgtcccagtagacacaaaacttttcccagcaaacttgatagccagccgaaataacgaggttaggtcgatgggcattcagatctaaacctgccgcttgagcgcgtttacgccaggcgaatttcattgctaaaccgcctaacatacaagcttcagaggagccaatcgtagaggtacccgtaaagtgttcgtcatcaggtgcgtgccacagattggcaataatgttcacacaccgattttcaatctcggccgtgcgggggtactcagatttgtcgatggcattcttagccagcgtatccttcatcaattcaacggcttcgggttccatataggtctgacaaaaagttgccaggttcagtcgtgaattgccttcatctaataattcatcacgaactaagcgatcggcttctcgaggggataatgaatgctttggtaaccgatacttaggaagatcatgttgttcagaaggcgcaccaaagactggttccaagtattcttcagcttcatgattgtgtttaccgtataacattgccatgttggtcacccttatctttataagttgtgccgagtatagcacgaggtgataacagggtaaattaaaatgcaatctggatggtaggtaacaaaaaaactggtcgaatggacgaccagtttttagtgaggatctttgccccaattaggctttatcgctgaactagcagttaagctttggctttgctattcatgaatttcttcaacagttgcaattcttcctgagttggcgttgcttcaccagatttaatgttgtgaatccgttcaactgataattgactgccaaacgcaaggtcgttatctgtaagatggtgctcgcgttcaaaactgatgagcttttctgataattgacttaatggtagttccatgctcctcaccccgatttttagaattcgtaaaagttcagtgccatatacctgctacttttattataaccttaattggtctgaagcggggaacgaataccatcctattttgtaattggttgttttaattgatcttgtaggtggactagaatatcagtaatctcatggggaagctggtcatgattgttgtgttgatattgatcaatgaagttagcccgaattcctaaacgagtggcgaccaagttacggtagtctgcattggcataatcaactgggaaatcagctaactttaggttttgcatgtgctccaagcctgcgaatgactcccacttggtcgtatcattgacaatggcttccagcgcacccaaggtaatttccttaggaatcttcttatcgccaaagaagccagtattcaataggtaacaatctaaatggcgttcttcgaagagtgccttgaaatcatggtaatcttctgatagtggatagaccctaaatgggtttgcaaatggttcgatcactagggcgttacggtcgacattaccaataatattttcggccgagctccgtttggtcgctaaagtggcgccgaatgtcgctgctaatacgggatcatctactttaatcacgggtggtaagctatcatctttcataatccagaagattgcattgatgggagcggcttccttatcaacccggttagtcgaagcgtaccgtgacttgatcgtccggccgttaccgttgcgtaggtcttcagtgacaaggaccttgcgaccctgatcgtctaaggtgacgccgacgttttggatcgtcataaaatacttggtctcatcggacgtcatcggatagtcattggttttgtcaaagtaagaaggctcgagggccacggaactaccatccttgcgattgatgacaaaggcgtcgtcgtggagaacggtgatatcgtatttatagccgtgtttagcgtgggttagtgttgacttaccggaacctgataacccgaacatggcgaagacttggtcttgcttgttcttgaagtggaaggccttcaagccaccgtgacaagcaacgaagccgtgacgatgggcgatcgaccaagctaaggtcaaagtcgatttcttcaactcaccaaagtatggcattcctagaatggcagccgtattatgttgcggatcaaaaatagccaggccgtctggataatctggatcatggtaagtagggtcagcgtaaatgtaaatatcgccttctggataggcaacggaccgatcgaacatttcttgataagcagtggtgatgggctggaagttaagcatgtaagaaagtagattattggcaaagccgtccggaatcgcgaggtgggcccgcacgatgaaatcttcgtctaaaccgactagaacgtccgtcgtgatgaagtccttgtgagcactagcaaatagtgcttggcgtaggcgtccggccatatcggcttcactaacgcccgggttgcctagaatccggcgcgcttgtgcggttcggccaacaaccttacctgtattggcaattaacatttttgcatcagctggtaagcctaaatccgttgcgcgatagattgggaggtccgtaataacggttccggggtccttggtggcgcggtggtaggcggcggcgacatcatcaacgtggtgcatattgttaccgtaaaaggccgtttcaacggtagaacggatctgtgaaaagatcggattatgacgaccgatatcggctaattgataagaatttttagtgctcatattgtagcctccctgcaagttgataagttaattttagcacaaactttcacataagaaagcgttttcttttttggctgatgaatagctgctagtgcgtttagacgattaagacgttaagccgcagtggttgttaactaacttgtagttggaagtactcgcggattttattgataagtaatgatcattttgatagttgaggctgttattaattaactttccaattaaattatcacttgcgttcaaagctatattagtatagtttattaaaagagaatgattgaaaatcagtgatagggaggcacctttcttgccacgaagaaggaacacgcaacggcgaatggagattgttaatacagcgtttcgcttgtttgccgagcaggggtatgcgaacgttcagatgaaggacattgccattgcctgtgatatcagtaagtcgttgctacaacactatttcccgaagaaaatcgttttattaagtacgatgttaaatgagttgacgcttagtgcttttatctatagtaatgaacagctgaccatgctgtcttcgtatcagcgaacaatgattcaaatgagctttgttttgcggatgttagatgaaaatccgaccatggaacactttattcaggacatcttcgagagtccggaactgacgactgagatggtgctagtgacactagactggctagaagctatcggcgtagaaggtgaagctgctatgattagatacgcgttgaacttcgcgttatctggtggtatggctgtttttttcaagcgtaaaattctaagagctagtgttggcatgattgcagaaaatatcgaccaagcgttttacttgttattaggtgagaatactgagaaaattgatcaaatttatttgagcacagccaagtataatactgactattattatcagcaattcatcacgtatctgcataaacacgcgacccttgacttgagtactgaaataaaaatttaatattaaagtaatctaaattacttgtatttcgtaaaatatactagtacactttaaagcggggaaatgataaacgacgcttactaatttatgaaaaaagtatggggcgaattatgattgggaatttaatgataattcgactagtgaaagggagacttgaataatgaatgaagatatggaattttttaatcgctttagccatatgtatttacatggctttaaaaacttatcagatatgtttgctgaacctgcaacggaacatgggattactttggatgaattttacattttatatgatattgctgaagcaaaaggtaagatccgtctgatggatattgccgaaagtcacggtgtgacgcgttcagcaatctcacgcttaattggtcgcttattacggaaagattacttatatcaagaagctgaagaccatgaccgtcgtaacaaagttttaaagttaacaccagaaggcgctcggattgaacatgaagtctttactgaattgattcaacgcaaccgggaatggcgtcaaagcttcagtttagctaaacaatatcagactttgaacttggttgaagagtttatggacaagtttgttaatgaagatgctagcaagcaaactaaaaagacaacgtatgctgatactgatttgaagcgggctgaagcttaattgggtgtcagttacaattaaagataattacaaaaacaaccctgttggcgtcttttggtgctaacagggttgtttttataatcattaatgaccactgatcgtgattcggaaatgatcaagacgataggtgctatgaagtctcgatggtaataggtgtcaagctggttgtttgcgctatcagatataatccgtgcttgtacttaaaataagacttattagtaattatttttggaaaaagtgagcgcttactgtttgtatagtagtcacattgattgggtgatttgtataaataagacgagcggacaaatactcgtcttactcatatgaactttggttgccttttaacctaatagcgcgttcaaggtttggttaggagcttgcttgatattgcagaattaatatcaagtttaagagtgattaaacttatatgcgaattttaaaacacaaaaaaatattttattgtacaaagtaaatatcctatttattcttctttataaaaaatttgattcaactcgcgatatttactcggagtaatatcgaattctttttgaaactggcgtgcaaattcggcgctattgtagaagttgattctttctgcaatttcacctataggaagatgggtattaattaataattgctttgctcgctgtaatttagcgtggcgaatgtagaagttgatggtaaaccctagttctttacgaaatttacgcttagtgtattcaggatctaacgtcagttcttctaagatggtatttgctcttaatggctcatcacaatgattatcaatataatagacaactagcgcgacttgcttagagaggcgggtaccatcaattggaatatcaagtgtatcaagattgctaaaataattgttgacgattgactctaaaagtggcataaaatcatcattcgttagtgttgttgttgtgaggtaatgcaaaatgtcctttcttaagttaacgaatgtgatcatgttcaaataatgataaaagctgacacttgctagatcacaggttagtgaaattaaggcttcttttagaatgagtgggcggacgttgtataagttatccttgattttgtgattaaatctattgatatgttccaaggcgtagtcaagacaacgcttttcgaaaaaataacttaaatcatgttccaatatagcaaaatcaaaattgaaatcgcgttctgtttgagaaagtttgagctctggaaaattcaatggacagttcctcccccataagttacaaaaatagtgaattttatacaaatagtaaacgtacataatagtgtacttgattaactttaattagttcaaggataatgactgatttaagttatccagtatagacatataaatattcttcgtcaattagtttgctaaaagtttattaataaaggtgaatttataatattgatttaaatattaatatgtttgtacaaaaaggtattacgcgctattgatgaagaagattaatatgctaattaaattttagggggaattgacttatgacaaagtcacgtacgctcaaagcagctatgctggtttcagtagccagtattgcttgtttatcattcaataatttaggagcttccgcggacaccttgccttcaactggaaagtctcaagcagatgtttcgtttacgtctaacggtggttcgactaatcctgttgatccagacaatccggataatcctggcggcggtggtactgggaacaacgggccactttcgttagatgcggtaccaacgtatcttaattttgggacgcatacgcaacctaatgttgatacggcctacactttactttcaaaagatgctagtcaggagagccttgcgacagctaatgatgataagacccaaaatgtgacgactagtggtaagaaaaatggtaatgatatcatttacacgcaagtttctgactcacgggggactggtgctggctggcaattaaaggcacagctttctgatattacggcttctgacggccaagtgttaacgaacgcgtcagttgttttaagtggtgggacaccacaatatctgacaggggaagctaatcaacaatcttgggtcactgcggcggatgcgaaccaggcaaccgttgcaacaccaattgtgctcaatgccggcgcttcatcgacaaccgatgttgcaacagccacggcagggtctaaagttggtgacggtcgaggtatgggggtcaaccaacaatactggaatattaataatgtgcaattacatgttaaaggtggtcacgcagccgctaagaattattcagggaatattgtttggacattgaactcgacaccaacggcttaatgaacgaaaacgagtggctatgttgaatagttaactcgtttttttgaagggaggcccttttatgaacggctggaataagaagctattattagggatgttaaccctaataatgactttgttggctggtatgactgtgattggccatgctgctgacacggccaataatgcggtaacttttgatgttcagccaatgcttaatgaaaagcaacaattatcaaaggacgcttattattgggattttaaaattcaaccgaagagaacatattcgttagcgatgcgtgttaataatcgctcaaatcatgaaattaaagtcaaaaatcaattcctacaatcgtatactaatgcgaaaggtgttattgattatggtgctgctaatctgaatgatgatactagtttaaaagtaaaactagctgatattattaccgtaccggatgaggaaacgacgatcccagctaataaatcacggatcgtgcgggcacagttaaaaacgccaacgaaattgaacaaagggattattttaggaagttggcaagttaaaattgcagatcaacatcttaaaaccaagggggcgacgttaactagcgaatatgcctacaatgtggggatcaaactaacgtcaaatcgtgatccattgccaaaattacgcttggctgatgttcaattaaaaaagcggagtggcatcaagacagttatcggtaatattcaaaattactacgcttcaattctaggcaaagggactgtcactgcctacgttagcaaagctgggcagaccaaaaagctcgcggtggctgatctaaaaagtagttcgatggctcctaattctaactttgacttaccgttaaagtggcgtactaatcgggggatcattttacctgggacttacactctatacgtcaagtatcgaactacggatgaaaagttcgctaagccgcatgtctggtcgctaaagcaagattttgtagttggcgctacggatgctgttaacgtcacgtctccaactacttggggttggttgattggtatcgtgttgttagtattattgctcattgctttaatcatattctgggtaattaaacggcgtcaaaataagcgctaaggggtgatactatcaaaaagctaagagcaattgttgtcatattgatggtattgttacaagtcatagccgctggtgcaacggtaagcttaggcgccgatatgaccgctcaagcagctacgttaccacagttaacttttgcaaaatcaacggctagcgataatattttaacgaatcaacattttgatgttgaactacaggttggtgatacggcctctaaaataaatacgattgatttaccgaacgaggttaatttagatgggccagaggagtttaagcaaataaaacgggttttcgatgatagtcagtacacaacgggggataatggtgcctttacaattacggctaagcatctgacagttgcgtacaatcctgataagcgcaggataacggttcagtggtcagatgaatatccgcaaacgaaggtaccaattagattaacagctgttaaagcagaaaaactggcgttagttgctgtagccgatgatcaaaaagggccggcgttgaatgtcgagattaagcaaccacaaacgcaggctgatcaggccagtacgagttcagctagttcttcagcggcaaccgatacaaatagttcgacggcatcgtcaagtcgacaagcgacatcatcagcagcaagtttggacagttcacgttcagctgcaacgacgctttcaagtcaggcggtaaaccaaacgagtgctagcagtagcgagccttcacaagaaactgctgctaatcaatcgtcagcggtcacggaatctgcgggtgagacaactgatagttcggccagcatctcgtcgtcatccactgctagtcaagtgttctcatcagcaccaactaagcaagcaacggcgagtgccaaatctagtccattaataccagtcactcggttagctcagctgagttcgaatgtggttgatgttagtacatggtctcaattagtcgatgcttggaagaatgtgagtgttgatgaaattaatattacggctgatattagtaatccgactgccgctgcagggtctttggactcacgactatccggtaatattattgtgaatgggaatggacatagcgttaatactggatctgctgggtttcacactaggtacaacggtgctaccagtagtacgaaatatacagcgacctttatgaattttgcatcattaatcggatcttttggaaatgatgcggggttgattggctcatccaccggtggcgatggtgccggaggggctttgaattggacatttaatgttagtaatattacggtcccaagtgggactagttataccaatacaagtcggcgatttgttagtgcgcaagggaaccaagtcaatattaccggcaattgccgagtaacaacggttcgagaaaacatcttatgtggtggctttgatgtagctgctggacagacattcactggatcgaaaatagccaatggtgatgataattcatttatctggtttgtttatgactatcaaggaactggtaatcggcaagttaatgttgaagaaggcgcgacgctaaattgtattcgacgacctgctagttctacgtcaaccgcctatactacctatccggttatttttgatgcgtatgaaagtattaatgtgggtaaaaatgccacgtttaatgctagcgtgccaggaaatgcatactctaacaagtacttttatgggtcacaatatcatcgtaatttttacgcggatactggtagcaccgttaatctaacgtcactagctagaagtcaatcgccaatctctttttctgataatgcaacttcgacgattcaaagtagtagtggtgccaatatttatgtaattgctgctacgggagcaccgcttatttcgggaaattacgcgcgtttggctactgttcgatttattaatccgaacaacttggatttacgtaatagctcaactggaacgactgcagcggctagttcgattaaccaagataatgtgggcacttttgaaatccaagatagtaatattagcttgtggaaattagcatcatcggttacgggcggtgcggattattcgtatagtaacgtatctcagttattacaacagggttcagcagtgacggccacggatagtaatttgcaaagtaattatttatcttctaaaatgcgtcggattagtgccactaaccagaagccacaattagcatttaataatccgtatgatgggacaaccaagctaacagatgcggatcagaagctgcggacgcgagtcattgtggcgatggttcctgatactaatggtgttcaagatgacggaacggttaattatattccacagtatgctagtgcagggcaattaaccgtgagttatagcgttaatggtaagacaatcactgcccaaactgatagtaatggctacgcaacagctaatgtcgggacctttttaaaagctggaacgacggtcacagcatcgactagcaataccagtggaacgacggtcacggctaccgggacggtggttgatgtgacgccgcctaatccggccacaatggtatcaccggaccccattagagtttcaacaggaacggtgagtggtcaaaatggagaaccaggtgcgcaggtcacattagcattgaatgggcagattcaaactaatgtcaaaacggttgtcaatgccaatgggacttggtcactgaacttaaccggattatcgttaaaaattggtgacaagattattatttatatggctgatagtctaggaaatcgtaatcctgatcctaatagttatccaaatgggcagcagtatcatgatacgactttccaaccagcaccgatatttacagtagctaaggatttaatcgtcaatccaattgatcctgatgatcctagcaagcctgggactggcgggacgaacaatttaggcccattatcgttggacgctgtacctacacatttgaactttggacagcacagcattccaacaatggatacagcgtacccattgttgtcaccatcagccgctgaagaccaattggctactgctactgatggacagaagtatgcaacagttggtggtcagaaaaatgggcaggatagtgtgtatacacaagtgactgatacacgggacaccccaagtggttggcaattgacggcccaattatcagcgttgacagctactgatgggacgaccatgacgggtagttacgtgacgttaacatcaggaacggcgcaatatttgaatgctagtactagtaaatgggttacggcaactgaccaaaatcaggcaactttaccagccgtgattaagttaaccccaggtgctacccaacaaacgtcaatagctgggacgactagtcaacaaggcgtcgggactaatcaacaaatttggaatgttaataacgttgcgttgcacgtcaagggtggtcgtgtgatggctaaaaattattctggaactatcacttggcaattgaatagtttgccaagccagtgatcgttatttaatggtatgcttcaaggcttaaaaagaatcggacgacaaaactgattgcagttttgtcgtccgattttgagtatccgagattaataattagccaaagattgatttgaaaatagagctgaagaagttaacaatcgcgctccacattttttggagcaagttttgattttctttagtattgagtttgctgaagacacccttggcatttgattgaatgttcttcatcaacgagttggcttgagtcttaaagcttgaagaatctaatgcacctgaatcacggatcttgactaacaaattaataatttcagtcttttgattattagtaatgacatttgttaaattgttattggtaatttgttgattgacaatggtcgtgatttcgtttttagtgatgttacttcctttttgggccatttcctttttggcaccagccacagcgttgttcaactgggaatcagtataaccatccttgctcttatttgcttgagtgatgccactgagagtacttaactcatcttgggcggcggttacttgcttcgtgtttaagctgttaccagattttgcgtacgccgcgtaaacaccggctagtgcgcccgaaccgtcgattggagtagctgatgtgacgcaaatattagcatcggtaatcccagccgttagggcggcgtttttatactggttagccgtaatagtggtgatgttattactaccattataatttaaaattttgacattaattccagaaccagaacttgttttttgaatcatcgcactggaccacacacctgagctacttgtgaaactttcaccggctgggttgaggtatttaactagagtatcgccgttaacagttagcgtctgataatcggcaccgttcaagctagccgttaacgtgttgatcgtcccagtcttttgactgctagtcaggctactgcctaatgtgacaattggttcatcgctgctactgtcagcgtgcgcaaggacttgccagctgccaagcccaacgatcagggtggcaacgagggcaacccatttaaatttgaaactcattcgtttcgtcattttcttttcctccgcatcttaactaatgcacctaaatcctaacatgaaccgttcgctcccgggttgtacagtggcaactagcgattgcaaggttaggttatgtcattattatagcagaccgtggtcgtaagttaacattcggcgcgtaaccttgggagagtcctaagtattttaacaatttgtttattatttgccgaagtaccagactttcgctatactcgaaataaatatcgggggaggttataacaatgacacaaaatcgggtgattaacgcgttgagctatttaagcattttattcttaccagttttatttccattaattgtttggttgctgacgagtactaatccagaagcacatcgggttgcaggacgggctttttggttacatttgttgccgacaattttaggaattacactgctcgttattttaggcgttagcggtatttatatggacagtatcgttaatagtggctggttggccgtggttcttttagcggtatttggattagtcgcagtggctagctacttatggtcgattattcgcggaattcagtatttaattgctgattaatgtagtagcgttaggttcaggagggtttagcatggttgttaaggacgcatcagtggttgaaacagcaatgatgattcaattttggcagcgtggttattatcaaacgacagttgacgacttgctcaccgttagccagttgtcacgaacgcagttttatcgccagtatcacagtaagcgggttgcgttacgccgttcacttgaacgctatcaaataacgttagatgaacaacttgatcaattgattcaacgtgagcgggcgcggcaaacaccattgcccgctttaattgcggcttgtttgcgactgccgtttcagagtgaacggtggccagcaggatgtttgatggtgaacctgatggccgaaattgggtcgcaggatgcgtccttgatggcccaactgcaaacgatctatgctgatttacagacccgactcgtcggtttactttcacctcaggctaaaaccttaccgaccacggtcgctgaggctgcagcaagtttaatgcaggttcgcagcggcattcagttattggcaaaacaggatcctagtggggcacagctaaaacaacaggcccaaacgagtgttaatctgattatgggggcagtttaagatggttgagattaaagtcattcacggtgatattaccaaaatgaccgttgatgcaattgttaatgcggccaatacgagtttgcttggtggtggcggcgtcgatggtgccattcatcgggcagctgggccagcattgctggatgcctgtcgcccattacacggttgtgcaactggtgaagccaaaattacgccgggctttcgactaccggcgaagtatgtgattcacacgccgggtcccgtttggcaaggtggccagcataatgaattacaattgttagcgaacagttatcgcaacagtctgaatttggccgctgagaatcattgtcaaacggttgcttttccgtctatcagtaccggcgtctatcactttccgctatcaattgcggcaccgttagcgttaaaaacgttacaagcaaccgcgcagacaacggcccacacggttcagacaatcacgattgtttgttttgatgaccaaacgcaaaatgtatttagtacggcgttggcagcgctgacaaattaatctttaccaaaaaaatacacatggacgctactatcttgagtagctgcttgctataatgttgatataccggccatcggggatggtcgtaaatctttatgtattgggattatcaagcgataatcattgccaacaagaaaggaatccattgtgttagatatttttaaagcggtaatcttggggattgttgaagggattactgaattcttaccaattagttcaacagggcatttagtcctagttgacgaatttatcaagatgcaacagtccacgcagtttacggatatgttcaacgttgtgattcaattaggggcgatcatggcggtcgttgtcctgtatttccataaactaaatccgttgtcaccacgcaaggataccacggaaaagcgaaatacttgggttctctggagtaaggtgttattagcggtcattccatcagtgatcgtggggttaccgttaaatgattggatggacgaacatttaatgaattgggcggtcgtttctgccacgttgattatttatggggtcctattcattgtgattgaaaatcataataagcgcttaacaccccgattcgctaatctacaaacgttaccttatacgacggcattgttcattgggtgcttccagttgctctcgttgattccagggacttcacgttccggtgcaaccattttaggggctatcttgattggaacttcacgctacgtcgcaactgagttttcattcttcatggcaattccaacaatgtttggggcgtcattattgaagcttgtgaaattctttgctcacggtggttctttagctggtttgcaaggagcagtcttagccgttggggtgatcgtgtccttcgtagtcgcttacttgtcgattcgtttcttgttggattacatcaagaaaaacgacttcaaggcgttcggttggtaccgaattgtcctgggggtacttgtgattggctactttacgttgattcattaaatactagaagcgtaacttttggctaagcttgttgccgcaaatatcatgaataaataaagtcagcgactataaattagttgctgactttttagattatatcattctagtaatggatggaccgtcataacgattggataagtgataaaccaatcgttatgacggcttttttgaagtaatcgtgttaccgatgaactaatttatagttggttacgccgtacctttgattgaatgtgattctgacaatttgtccgcgtttgaatggggctggatcagcagcaactgtattaaaatgaagatactttttttcgcccttagaattagttgctagtccttggtattgatacccagtagctgggatattgaccggtagtgtaatgggggaagttccggtactactcgatattttcatgtagtagtaatgaccgccatatcgaaaaataaaccaaccaacatttatcagaattgagattattaataataaggtgagcagccattcgatgagatgattagacttagtattcattgtaatattctcctcgtatactactttttaaggcttcgcaatcacattgaaattgcagctgtagaatcgtaattaggcagtattttaattgaatttacagttttaaaaaatattaatgaaggtcataattttatgccaatcttaccaagggtatttttctttttctctaagcttattttgtcagtatctaaataataaattgagcttttctccctccaagttagaaaatctcgggttaaatacaattattattgtaaatgttgcaggcttataagcccacaatttgaactatattagacctattaacttacttttattgtaagtacttagtaaaaggcgttatctattttttgctaatcatttaagaagtctaacagctgaaaatcaagataacgtggtgtcattttgctaaccgacaaagatgcactagctgatttttctgattaaacaaagtgtaaagtaatgtgattgataaattcagcgacgagaaagccaattgcaatcacgccagcaataatgacaacttgtacaaagtactggtaggccaagtctggttgaccagtgaccaagttacgaacgactcgataagactggccaccaggaaccagtgggaccagactagggatattaaagatgatcatcggcattcgtttgtagcgtgcggccataccgctagcgacgccaatcacgatagctgcgacgagattaccaatcgcaagtttggcgtcgattcctaatggcaggatgtgatagaggacctcatacgtaaaccagccagcagcaccgacccaaccactgaggttaacggcgcgacgcggaatattgagaagtaccccaaaaccagccgtagctaagtaagctaagataatttgaaataaaccggttgttaagagccaatgtagcatgtcacgcctcctttagtagaaaaatgaagtcagtgcgataccaacaccaatcgcacacgcggataaaacggcctctacagcgcgggcaggaccactcagcaagttacccgtcattgtgtcacggacggcattagtaatggcgacacccggcactaatggcattacagcgccaataatgatggcgtcgggatgataatgaccgttagtgagataaaagccgagtagggtaattagaccaataataaaagcgcccataaattcgctgagaaaccgaattgaccccagccgattgatccaataaaaggcagcaaaaccagccaacccggctagcccacaagtgatcaagtcggcaggagttgtccgcccagtaaaggcgaccatcaacggcacactaacgacaacggccgctagacataaccagctgaatgggaaggtcggtacggcttgattgacccgttcgagggctgcggcaaattcagttaaatcaatatcgtgattagcaaactgccgtgacaggctgttgacctgatccactttttcgaggtccataccccgattatggattgctcgcacttcgctagtggcattttccggcaaggagacggtaatccctgttaacagtacgaagacctgcgcgtcagggtagcccgcgttggttgcaattcgttgcatcgtgtcttcaactcgtttgatttcagccccattttctagcaaaatggcgccggccaataacgtggtttttaacataactgccgtatcgctcatcaaaacccctcccacatcagaatgtttatattttctcacgaattttgcgtatcgtcattagtttggaacagaatgtttgccggaagtggtcggttatgggtagaattatcttaacaaataaattcttggaggcatttttgatgactgcattgactaaactcaccgatacgtacacgttaaataacggcactaagattccgattgttggttttggaacgtggcaaacacctgatggtcaggttgcttacgattccgtattagccgcattaaaggcgggttaccggcacattgacacggcggcggcctatggtaacgaggaaagtgtcggtaaagctattgccgatagtggtgtggcacgtgaagacctattcgtcacgaccaaattatggaatgccgaccatggctatgacgctgccaagaaggcgctggatacctcgttggctaagttaggtttggactatgttgacctctacttgatccactggccaaacccagccgcaatgcgcgacaattgggaacaattgaacgccgatacttggcgggcaatggaagaagcttacacggcacgtaaagcacgggctatcggggtttctaacttccggcctaagcatttagacgcgctgcttaagacagccaaggttgtgccagccgttaaccaaatcttcctcaatcctagtgatatggaagatgaagttgtggcctacaaccgcaaacatgacattttatcagaagcttatagtccattaggtactggtaagatcttcagtatcccagaattaaagacgttggctgataagtatgataagagcgttgcccaagttgtgctacgttggtcattacaacacggtttcttaccattaccaaaatcagttcatgcggatcggattaaacaaaatacggaattatttgatttcgaactcagcgatgatgatatgaaggtcattgatggtttccacggtgttgccgggttagctaatgatcctgatcaagttaatttctaagtttcatcgttattaaggatgcagccactggcagcatcctttttatttggctaatcacctaattgtcggagtcagctagttaaattagaaaattcgttgttatcgtaaaaagtgtggcgcggccgcttaataatatgaggtaggccccctaattagactaatgaaacgtcataagatgtccgattgttgactagcaacctgactatcacagcgattggactatggtacactcagttttaattattaagtctgggggcctgtgaatgttactgatattagcaattttaccaattgttgtgacggtgggattaggcgtgtttgcggggctacggcaccaatttgcgccaacgaccagtgatattttgattcagttggtcatgcattacgccttgccgttaagtcttttcggaggaatcttgtcattaaagcgcgctaccattattcaaaactcctcggtcgcgctgtggttggcgctaggcatgctaggtggcatggtcatcgtcattgtgagccaatgctgtttccatcagcaactagaaacggggacgttacgagcgctagtgatcgccagtccttcaattccattcatgggtgtttccgtcttactggtggtttttggtaaaatcagtgttttattggtcgcgttaggcggcctgtacatgaatttggtacaagtgccagtgagcgtgttgctgttaacgctagcgggcggttcgacacctgagcaacgttggcgagccggttggcagaaactgtgtcgtgcgagtcggcaaccagtcgtgtgggcgccaatcagtgcttttctcttgaatttggccggattgcggttgcccagtgcttggctaacgaattttacggagttgggacaagcagctgggggcgtggcgttatttgcgctggggcttctgttaacgaccagaccgtggcgactgacgcgcatggttgtcttaaacgtgctactgaaaaatttaggcttaccggtgctcatttgggggattatggctagtctaggtgtgtcattaggtaaccaacaattagttgtcttgacactcgcaatccccactgcaaccatcgcgaccatgttggccgtccaaaaccacttggcaccagatgagtatgtggcgacgcaaatgttaagtacggtcattgcgccgctgaccatgggattcttaatgtggggattgcagctcgtatgacgggcaccttttgattaccatgctgggtttgtgaggtgctcacaaaggagggcacgacttgcggtcagtgctgttatgattcccgattgacaaaggttaattggcacggtttaacgacgatgctaaaccaaacgttgtgaacgtcagtatagacaaacccgctcaaatagggcatatttgagcgggtttgtcgcgttagtcttaatagtgaacttgaaaattagtcggttgcgttgcgttgacgacgggatgttgcgcaaagtagtcggcaattaatacggtcatatcagtaggtaagcgccggataatcttagccgtttgatacattgggtaattcccaccgccaccagcgcggtaatgattcagagtgaccgttaatttttggtcagcggtgactggggccccatgataatcgagttggacgacacgttgaccaaagggtttggtaaggtcgaaagtatagtcgatgccactgtaaatatcatagacatagtggcgcaacttagggtgcatgaactcgggattgacccgaacgtgtccgtcttggaggaaaaagtaactcgcacaacgttcaagagcggcgcgtaaatcagcaccagtaatggcttcaacggcaagtttgtttgggtagacgtaactgttcatgacttcccgcatcgtcacgtgttgtttgaggcctggtacgtcgtcattaaataatgctgttgcggcaatatcggtaccggttgcggccatttcaacgcgattaataaaatcgatgtaaggatgattatgcagccgtgcttgaagatgatcgtgtacgagcatattgccgttaatttggccaagtggtgtgtctaaccagtcttccatctggtcattgattggtccaactagttgcattacctgggtattgggggtggcatctgcgaccggatagatttccggatgactggtcgtcacttgatgattgcggtcgagctcaagggtaatcatagcaacattagtacctttcataccaggttgtgtcacgggaacaccgtgaaccgtaacggctaattgtcgatgctggtggccagtaatcatggcatcaatgccgggtacttcagctaatagtgcggatcctcggttttcaccattcatgcgttcggttggacgatcagtttggggatcgcgttcaagaccaccgtggtaggcgatgacaacgacgtcagccagttggcgcaatttgggcacccaatgtttagcagttgcaaccacctcctcaaagtgcaggccggcaatgtgatgtggttgttcccagtgggcaacgaattgtgtcgttagtcccaaaattgccactttaactccggcgcgttccagaattgtgtatggtttggagaataaggtgcggtgcaggtcatcatgaatattggcggccagcatcggatattggcggcttgattcacacaggtcgaggtagtcgagcccgtagttgaattcatggttaccaaaaataccggcttgaacgtggttgcaatttgcaaggcgcgagtataacggtgcagcttcttggtggtggcgagcaatgaaataggtcaacggtgatccctgtacgtagtcgccattatcaatcacgattggccagacatcagccgtatcttcacgtgacagttgatgaataacagtagcggcacgactaagactaaatggtgcgatgttatcacgacgactgtagtcagttggcgcgaggtaaccgtgcacatcactagttgagattaatttgattttcataacgtgcctccaaggaatatttgtgttctattataacaatattcatggctggtaacttgattttagtcataaattgaacagttttttgatgatgacctgtggttaatgtttaatggctgctttaattgtacgttctaatcttcacgactttttcacaatttgtacgtaaaacgacaaaatgtttccgctatcattaatagtgacgaatgacaacgataatcgaattacggaggaataaacgatgcagaattatcagaatgcaccattcaaacctacccccgagtccggtttaacgaccacagcggtgacgacccagctaactaaattcggcaaaaatgaattagtggctgcgcgccccgtaccgttatggcgtaaaatttggcaacatatgagcgacgtttcatcgctagtattattatttgcagttggtttagccacgtacttggctcttgcccagaatgggggctggacaaagaccattgtgattggcgccattttagttattaatgtctgtattggtttgtaccaagaagcttccgcagaaaagtcgttggcggcactgaagtcaatgagtttacccacagctaatgttcgacgggatgggaaggtacaaacgattgcggcaccagaaatcgttcccggtgatttagtgctactaaaagcgggtgaccaggttccagccgatgcggtcgtgttagaggccacgaacttagccgttgatgaggcagtcttgacaggtgaaagtgaagctgttgaaaaaagtatttatcaggacaccggtgagttggatgataactgtcaagtgtatgcgggaacggccgtcacagccggtactgcattgattcaggtcttaacgaccggaatggccacagagttaggtcaaattgcaggtttgttgaacaagacgaagcaacgggccacgccattacaggggcggcttaatcggctatcaagctggttaacgacatttgccgtcttaggtggtattacgatttttgcgctgagtgtttgggtgcaaaaccaaggtttggccgatagcttgatgattggggtttcattagcggtcgcggccgtgccagagactctgccgatcatcgtgaccattagtctttcacacggtgttcgacggatggcagacagaaatgccatcatgcgccgagttagtgccgttgaaacgattgggagtgtcgatgtaatcgcgtctgacaagaccggaaccttgacgcaaaatcgaatgacaattacaaagtattggacgccgaccacgggcattatgacgaccgaacagcccttgccatcagcgggacaaacattgatgcgttacttaggattagcgacgaatgccgagatcaaccacgttgacggtgaagaacaagctattggggacgcaacggaattagccgttattcgttggctggctcagtatgatttagatcggcccagcttggaggcgcagaccccacgaattgcggaagacccgtttgactcaactaagaagatgatgacgacggtgcatgaattagcgcatggtcgacggttagttatcgtcaaaggggcttgggatcggttaccactgaagcctgaccaagctagcctagctgctggacaagtggcccatgatgaatttgggcaggcggcgcttcgcgttttagctgttggctatcgcatcattcccgcggatgtccaaactactgactgggacgacctgacagctgacctccaattggcaggattgattggtttgattgatccaccacgaccagaagtgattccggccattcgagcagccaaacaggcgggtatttttccagttatgatcacgggagatcatttggttactgcgaaggctatcgctgaggaaattggcattttaacccctgagctgcaagcaattagcggtgatgagttacgccaattgagcgatgaagaattgacggctcaaatcgatcagattgcagtgtacgcccgagtgtcgccgagtgacaaaattagaatcgttcaggcttggcaaagtcttggtaagacggttgcgatgaccggtgatggtgtcaacgatgcgccggcattgaaagcggcggatgttggcattgcaatgggaattacgggtaccgaagtatctaaagaagccgctgacatggtgttaacggatgataattttgcgacgatcatggcagcagttaaggaaggtcggacagtttatcagaatatcattaaagccgttgaattcttggtaggtgtcaactttgcacaaatcttcttgatggttggtgcagtcctcttcggttggggggcgccactgttagcagaacaattgctgattattaacgtacttgctgatgggattccaggattctttattagccaagagccaggtgaaccccaagccatgcaacaaccaccagtagccaatgacgaaagtattttagctcggggccttggtcaacggttgtttatccgggcagctacttttaccgtactaaccctcggaatttacgcgtttggccgctttggcttaacaaatggtcaagccccagtcgggatgacgatggtctttctagtattggcattaggatcaatgatcgacatctatgcaattaaggatcgccgaccactcagctggtcaagcatgacgcgtaatccaatgctgaaccgaggattgctgttaggaattctggtggtcttggcaattgcagtgataccaccgttccgtagtttctttagcttagtgacactaccagcgttaggatggttaacggtgctagtagctacgctgattccaacattcgtgctggaattgaataagcgctggcaggcgcggcgacagtcacgattagtcgtgaatactgctgaataaggatgatcaattcaagttagttaaaatgctgcttacaaacgttattcgtttgcaagcagcattttttcgtgtcattaagttgtgtgcctaaaatactggccggtgagcgggcttagaacgtaagtcatcacaattgtaggcagataattctttcagaccatctttactagcatcgaaataggccgttaatccttgggcaatcattaagttgagttctttattcgcatcaaactgaacgacgatgacgggtgtcttttcagccacggccgcaccgatttcaaacattgtgcccgaatctggctcattggttgcactagtcatgtcgaagtcaagaatggcaacaacgacatcagcccgatgaacttgacgcatatcggatgcgtagacgtattgttgccaagcacggctaccaaaaggttcttcttcaaattgatgttcttctgggatgaagataccatcggggttgatcgtcgggttagccaacagcgccgacttcacttgttggatgcgttccttctgagcctcgtcaaaaaacggtgcagctaggtaaacgttattcataatgatttcctttctggataacaaaatttggataagcctattttagcggaaatatggggtggctttcaagccttgatttggcgtgaatcattattaaaagatccttattttgaaagttcaaaaatagccagcttaggcccgctggaaaaagttcgaatcagcgtgaacttgtttagttggttggtcctacaccgacttccaggcatttctgccaattgccggaacgtggtgggcacagacttgagccgaaaaatcacgtctcaaatactggcctttcaataaccaagcacaggacacttgctaagtgaaatttcaccactgggcattgtcagaaacgccttccagtcgggagagtattcgaatggcagacgaagctgtacttaacttttgatgaatttgccgttgctttttgtaaacagtaattttgttaatcaactgtcaaactgaaaatgatattgaggtagctcattaatcctgaatcggcatagtaagattcaaacttctgacagagtgcctagtgcaccctaaccctttgtctttgtttaatatcaaaatagtcaacgataaattgtgctaagttaagtggccgttcatcagccattcgagcggcttacgttccagcaattgtcacccagccccggaggtcggaataggacgatcattgctgacgaacagcaatccaaaaataagcaccttttaataatttttgaggcgaataataattagcagagtggatatatagattataattctatttataacaaggtgatgattagatattgttgaattaaaatctaaattgggctaaattaaatagggtagtgaggaggattggatgatggaggaatttggatcaactagtaactatttactttcgtgggaagagttgcccgcggtgcccgtttatatggaacagttgttgcaacttgttaatgaaacaattcagccgctggggttacctgccgtaacgaagacgatgattaatagttacgtgaaacaacattttttcagtcggccggttggacatcggtatacccggaatcagattgtggcggtactagtcgtttcaattttgaagactgatttttcattaccagtaattagtaaagcgattttgcaaattcgtgattcgcgtcagattgagccgcggtaccagcaatttcggcaagcattcgagtctacgcttgctggacaaccggtcgtcttgtcgacggttgacccgttagcacgggcaattcaattagcagctcaaacggtggcggcacatttattaacgatccgagcgcttaacgaattggtagattgagttgagataggcacataattgagaatagcgtttgataatatcgctatggctgcttgtagcgtattcgaattaaagcgaattaggcttagcagatatgattaggtatgaaagagagaaagagaatatgacaacacgcaaaaaatggacaattgcgctcattgcattcttgaccgtgatcgtcattggggtcgcgggcggtagtttttatttatatcactttgcatttgaacccaccccgaaagttttgaaccatagttctagtaagagtaaaagtaagttgaagcagaaccaagcgtggctgaaacgggtcaacaagcagacctggcatgagacgtccgcaacggatcatttgaagttagttgcggactatgtaccagctgcgcaccgaaccaccaaaacgattattgtggcgcatggttacatgggtaacaaggagcagatggcgagctatattcgattgtggcatcgccaaggatataatgtgctggcgccggatgatcgtggcaatggtcagagtcagggggattactatggttttggttggcctgaccggttggactatctaaagtggacgcgacaggtgattcgccgcgtaggccaaaatagtcagattggactctttggcgtttcaatgggtggtgcgactgtcatgatgatgagtggcgagaaacttccatcacaagttaaagcgattattgaagattgtggctataccagtgttggtgatgaattgggatatgagctgaatcaactatatcacttaccgaagtttccactgctgtatacggcaagctgggtagctcaagcgaaggcccacttcaactttatgacggcgagttcagtaaaccagctcaagaagaataagttgccaatcttctttattcatggtgctaaggatacttttgtccccacgaagatggtatatcagaactaccgcgctacgacggtcaagtcaaagcaattatgggtggctccaggagctggtcacgcggaatcatacacgcgttatccgcaactatatcaacaaaaagtaagccagttcatggcaaaatatttgaagtaagagctaacggaatagaataactaataaaggtcaccaagcagcgattgctgattggtgacctttattatggttaaaatatgctagtcggattagtgtttgtcagccggtccgcgtcctggtccgatctccgggactaagctgatagcttttgaacttgataaatagcgcggttaatcaaccgagtgttttgcaaatgggtgccgcatacttggtataaagatcagtacgccgatgaagttaagcagtaatgacaaggcggtgaagataaagacaccgttgtaatcgaaccagccggagacggcgccaccaagtaaggagccgagcatgctgccagctgcttggaaagattgattccaactgaaaatagtgcctgttaactcgcggggtgtatttttggataataatgtttgcaccgttggaaagagggccccgtcagagatcccaatcatgaagcgcaatagccctaatgtccacacactggagacgaagccttgtggaaagtacatcaggatggcaaagacgaaaccaaagacaaggatacggtcagcccccccggtgatcaccgagccgtccgagtcgcggcgccgataatagcgtcgaaattccgggtagagcggcaatgattccagcaacgacggtgattgggccgacgttatgcatcagttctttgacatatagactaataatgggcgtgatggaattattccccatttgaataatcatcgtggagacgagcagtgtgataatcaacgttggatttttaaattggctgagtagactgccgtcacgtttagcaatcggcgcgtcgctgggtttaaagctttcgtggacgagtgtcagactcaatacgaagacgatcagtagcaaaattccggtgataatgaaagtcaaacgaatagagaaaacttgggcgagtacgccaccgagaatcgggccgatcaagttaccagacacgtagccagttgttaggataccgattgcggtcccactactttccttgggagtttcggtggcgattagggcgctagcattgggaatgtagccggcacacaggccttgtaagaaccgaagtagaatgagtatccaaatgttatggacaaatcccatcgcaccgataacaaaggccatcccaagcgaagaacgcagcagcatgattttgcgaccacgccggtcagcgagtttaccccataatggtgagacaacagcgacgacaaaaaaagtcactgcgtatgtaataccactatacatcgtgagttcgtttttggagaaatccccccatttgaccaacgtataatgataagaatggcatgacttcagaaaatcccattccggcgataaatgttcctagccagagaacagcgagattccggcgccagcctgtcaatgcgcccttcacaatctgtcacttccttaattaacttattaagattattttaatgcgaatttaagttttgtgcaattaactaacttagttaaataggattgaatggcgactgacaatgaaccacaatgagacttaaaatagcccgtatagcagccttttattaatttttgagtgtaataggacacaatagggcacaaataaaatgcaccacaagtgcaccaaaaatgcaccacaaaattagattctcataattcactcatataacgagctagtttagaagcagtctcgttcttttgttttttggtgacgtgtaaataaatttgttcagtgattttaaggtcagcatgtcctaacgtcttagacacttcgttaattcccgcatgagcttcaaaagctagtgtgcagaatgtatgtctgaacgcatgaatctttatatggcgcaaaccgtattttttacagatactccaattaaaatagttaactgtactaggtgacatcagtttgttttgttggttagtaaataccagttgactaggatcattagcgttgaatccaagttcaaaacattgtctggcttgggtcatcttccacttgtgcaaccattgtgcagtgtctgggtcaagtacgatagtgcgataactggtattggtttttggtgtctgtatgatcgtacgccaacgtttacctactgcttgggttttattaaccgttagttcgttagtttcaaagttaatatcgctccattgcaatgctaatgcttcgcctcgccgtaagcccgtaaaggccagcagacgaaagaacataaatgcttgggggttctcgtgttttgacgcacaatcaagaaaatgcagtagctccgatttttcgtagaaatcaacgtgtggcgcttgtggctttattttttgtttaggaatactagttttagccattgggttacgggtggttaattccatccgtacaccaaaatcaaaaacactaatagcgtacgtcctaaaccgacggtacgttttgaatccctgattaagccacttatgcacgattgattgacattgggcgacagtgatacgtttaacccgttgagagcctaattcgggcaaaatatgcaacctaaagatgtcgtctgttatcatgtacgttgattctttgacttgttccttgtaatcctcgttgaaccatttagtatagagttcggcaaaggtgatattatcgtttgctatgaaaccattcttagtaaaatctgtctgaacattggaagtccataattgggcttctttttttgtcttaaaaccacgcttgtgcatccgtttggctttgccgttggtatctttacccacggatgtaaaagcctcccagaaagcaccggatttagttttatactgcttgaatgtagccatattgattattcctttcataccggctggcgggcaagtatgtaaggagaaaatacaatctattttataaaattaagtcttttgacatttaatcttttggaatagtctccccatggaagtcgtacaagtacggacacttcatttttgtttaagctcaatagataatcagttaccgatttacgctttttatgattcttaaaatcagcatctcttgtttcgtaggtgtattcccgcaatgcatcagaaattttgtttaatatcatattcgttacttcgtttttaaaaactacaggtaactcattaaaaatatttatgatttctttatcattagaattttcctcttctatatcaacgtataaatcaaaagtatccaatggtgccaattcatcaaaccagagactatcaataataaatacaggctttagttgatacatttgttctgttctaccttttaatacatcaaatagaatcatcttttcattagcatacgattctgcaaaacccaatcgaaatttataaggactaaaagaaaagaaatcagacggagtgacttcgagatagcggcataaagtatcaatagtttctgttgagatatttgaattaatattattagtgatattcgagatagtattgcgtgagatttttgtttcgtccacgacttgcttaattgtaagttgtctttcagcaagtaaaacgctaagcctatttgctaacataaaaactcctccttgataaatctgcattaattatatcatttatcaattacattgtgtatttaaacattgaaataatccaagaaccgtgttagtctatatttgcacttgggaatttaaaagtacaaatacacattacgaggtgtaaatatgaataatttatctataatcttaggagaacgacttctaactattggttatgtttcaaaaaaaacgggtttgagtcgtggaacaatctctactatttatcatcgcagagctgattcagttcggttggatacgttaaaaaaaatttgtgactgtttacagattccattaagtgagctaattgagtacacaccaaaggggggcgactaatgaacaatatagtcacactgacatcacagcgattggacgcggaagcatatacgactggcgatgtgattgcggagtatgcgggaattacccaccatgctgttaatgtaacgatcaatcagcagtatgagcggttggcgcgtgcaggtaatggcaaggtgtcatttaaaatgaagcctatgctaagtggtcaaaaagctaaggtctatttactcaacgagcaacaggctaccttgctgatcacgttcttaaagaacacaccacgggtagctgatttcaaggaggaacttgttagacagtttacagttatgaaacgtgaattgattttgcgtcaggctaagtttgaactaggtaaggatttttctaagtcattgcatgaaacgattaaagaaagtccggcgctgggtgagcatggtcacttatacgtgaatattaacaagttagtgtataagcaggcgttaggggtcaacgtgaatgagttacgcaaagctcgcgatattcctaagaccgaggctattactcactatttaagttctagtgaggcggatgcagtcaagcggattaaacagcaaattagaacgctgcttgaaatgaaactggactaccagcaaatcaagcaagctttgcagattcaaggcgtgatttaccgtattgagttgcaattgccagctaaagcatccgtcaaatagatgaaattagtgccgctgacaatggaatcttattgataaggattgaaaggcgcttcggttaacttgcccgataatcggatgaattagctgggaatgcgattcacaccttttatgcgggtgctacaagtcattgataggtggtgaggacgattacagaaccgattaaggtgttattaagtgatgaacaggcgcaggcactacgcgacttcgtataccagctgactacggattcaatcagtcaggccaagcgtgatgtgggtgctagtcagcagtggttacgcaagaagaaagcggcggcgtatgcggatgtatcagagggaacgtttgcaggctggacgaagcaaggattagtaggtcacgtcattaatggatcagtgctatttaataagcacgacatagacttctatatcaatcacaatggaaaaatgaagtaataaaatccggctggcgggcaattgcggttgatgaacacataataaattggattggagtggtaactatgattggaacactattgatgagtttagttaagtttatgattatttcagcggttggcaacgtgtcatttaaattgattgctaatccgggtaagtatttcggttaggtagattaaggagctagaacatgaatgagcgtacaaaaaaagtccgtgtctttactttggcgagtaacacggacagcctgaaaacactactgttatgggctttttgtatactcattttactacaaaatgaggagtaaacacaatgggtaagccaatttatgaactatcaaagttaaatgatattacagatacatgcaagcgggcaaacattaccatagaacgggctaaccgtgatattagtagcatcctagcgattagtgatttaatcgtacctaccctaaaaaatatcgttgaacatgcttcaagttattttgaactagacgccgataagctacgagaagtaattaatagtcgtgaaacaactatttacagcgtgatgtgcgtactaactgaaatgggtacactagcaatgaatattgatgaggagacagctagtttaaatggggttattgatgacattaatagcactgtaaacgggattaatgacggtattaactccgttttgaatggtggtaactcggattacaacgatgataactcacagggggcgactgatcatgaataacgtgcaaacccggctaaaccatgctaggacgaccttacaaggaactttattgcaactggactacttacaagagctagtcaatcaaacggtaatgcgtgatagtcaacgggctaaaattagtcagcaaatccataacattgaagtgaacaaccaaggcgcattgaaacaacttgcatccgtctatgaagtcccgttagtcgggatagcaaaatagggtggtgagcgaatgaaagcaaacgacagactaacgagagcgctgcagcttgctcgtgatggcgttgcggtttatcccttagcaagtaacagcaaagtgccgttaaaaggcacacagggctataaggacgctaccacggatgtagaaacgattaaaggttggtttgagcatgtcccaagggcgaaccttggcatccgtttagaccaagctaagttaatcgtggtggatattgaccgacatggtgatattgatggcacggaaacattgagaaaacttaatcagcaaggcaaacccttaccgagtgacacttatattgagcagaccccgaatgatggcttacattacttctttaagttgccggttaagctagatatgaaacggcgaacgggtctatatccgggtattgatgtgctggctgacttcgtattagtagcaccgagcgtgattaatggtagtgcttatagggcgattgaaccaactaacgatattgctacggtgccccagtggttacttgatgatctgttacccaatcaacggatgaacaaggcaccgcagcacgcctcacagattcaaaagacatgggcgggacggatgcttgatgacttagtggctggtactggcgagggtagtcgtaacagctacctgacttcgttattaggcaagttactacgaactggctgtaatgggatgacggcctatgagctactgcaatatgctaacgagcgattgcaaccgccactaccggataaagaggttaataccatttttaaatctattattaaacggacgtaggaggtgtcaatgtgtcagaggataagaacttaaagcaagccatccaagagcatgacaagcggattaataacgtcacagctttaaagggtgatgattggcaagaccaactccgattaacgacccaaggggctattcggcggagttcgctatacaatattttactgtttattgaaaatgacccgaatttaaaaggtgtgttggcctataacgagttctcggatcgagtggtgaaattacgttctaatgataaaacgggactaaaaaaaggcgattggcgagatacggatgattccttactacggttttattttgacgcacaatataacattttgctgtcaaaggataacttgctggatagcattgttaaagcgtcacaggaacatggctttgacccgatgaaagaacggattgaaacggtgaagtgggacggccatccaagggcggaaacctttttcattgattaccttggtgccgaggataatcactatacacggatggtaactcgcaagtggttagctggggcgattgcacgggtttatcttcccggagtgaaatttgatattatcccaatcttagagggtgttcaaggacttggaaagagtaccttggtgcgccagttagcgcccgattactttagtgatgatatgaagagcatgaaagataaagacgactatcaaaagctaatggggagctggattattgaacttgctgaactgtcggccatgaataagactgatattgagagcattaagaactttactagcgcccagtcggactattaccgcaacacttatgcacgccggccagaacaacatccgcgccggaatgtctttatcggttcaactaaccatcgcgactatttaaaagacgctactggtgagcggcgcttttatccgattaaatgtgggatacagcccgttactaagaacccactaaaggcgaagcaagctgatatgttacaaatccttgccgaagctaagacatggtttgacgctggcgaaaagctttattttgaccaacagacacttaatgaggccaaagcctaccaacaagaagcccaagtcattgatcccatgagagacgctgttaacgattatttagaaatgctagtgccgactaattgggacaagttatctgtaagtgtaaagcatacctactatcgtgacttagttaatagtatgcggttatctaacgaaattgaaagtcaattaagtaaggaacgtgagccactacagcaaacctcagtacgagagatattgtcagttgtctttaatcaacaagtagatgattatttggccgtgcgaactaatagcaattctaaacgcgttaagttgttgttggataatttagaagggtgggaatatggacgcttgcgattaaatggaaagcaggttcgtggctatcatcgaatcctttaacacaaactttttgtggaatttactgtcacactgtcacaaagtcttttaaacgttgatatagaagcctttttaaacaaaatttactgtcacattactgtcacaagctgtcacacactgtcacagtctaagctaaaggtgtgacagtaaatgacagtgatgtgacagcgttgtgacagtagaaacgttgctatggcggtgcttatagcgattgtgacagtgtgacagtaaatttgaactaaactttaaagaattgcatttaagatgaaacagaaaaggtaggtgccattaaaatgacgttatcaatgactgaatttaaagtattaaacatgttgcctcgtggtgctggttacccaatgacaacaccgaatatctgcaaggtaaccgggcttaaagaacgggatgtcagagaagccattagtatcttaattaatcaacacggcgtgccaattgtcgctaaccggagtggtcgcaatactggaatgtttattgctacggatgaagccgagttaaatatcggggtcacttcatttaagaaccaagttactacaatgaatgcgcgtattagagccatagagcaagccgacttgaatggctgggaacaagccctaagaccagagataaaacgcctagacgcaaaagtaagccacaataaggaggcgaactagtatgcgagtgctttaccctaagttagttgaagaagcctataattacattgctaaggctgaaccagccgttaagaatgcgcctaacgctgttaagtcagagatatacagtaagatggttaatgacgggataattgatgagaatggcgagccaacacagacagctattgatcggggcttcgttgatggtgatagcgagctagattatgaacctgatacgctggccgagtttaaagcaatgcacccatgctataaggagtatgatgatagccatttcagccatacgaagcaaggctgggtgattgacagctatgtgatgaagtcgttatcacttaaagcactgcatgatccggacagtagcgaagaacaacgcgcattcgcccgtcatgcgctacaagagattgaacggtttagttaataagcataaacgagtatcgtgctaaaaagtacgatgctttttttagttgagcgaagttgtcccgttagttatttatatgaaaatggattgttatatcaatggttaaaaggctttgatggcaatataaaatattggaaaataatggaatcaaaatgttagaaaatgttagaaatcaaaaacgggataatgctaacaattgctaacctaaaagccgaataggggtttacagaagtttacaaaatgagcagtattgtgcagatcgaactaccttataaaatcttatgtggaactacctattaaaacctattattgctttgctatgtaaactgcttgtttctgctaatgcgtggaatgctcgttggattgattgtaggtcgaaaatttcgacttaccctgtacatagttggttacagagttaaaaaaagtgatcgctataattgatgcacgtctacaacctgacaaaacatgacattgttttgcaatttaatcgtattcaacatgtcatgatctggttgctacttaacaaaacttaacattggaaatatagtgacgcttgaaaacctgcaaaaacctgcatattaacatagctatcctgacagttctgacagttctgacaccctaaaaaagaggcgggcaaataattatctaatgaatatagtcagtggcattacaaaacaactcatagggtgcactccataacaccgatatttcgacaatatggtgcaaccctatgctggtaaatgctagtattattcgtacaaaacggacaccatataataagcgacaagtaacccgacacagttagatggtatatttggccggagtgctgttatatcaacgcttgacggctaatgagaactcgtaaaatgtcggattatgtcggattttttacttgaaaatactggaaattgaacatcgctagttagttaatagcttgaatgcttgttatgactggccttagagctgttttaaataaatgaaaatgttggaaaatgtaggaatgtaaaaacggatgagtatgtcagctggcttagatggcgttgggttactggttgggctactggttgggttatttgtgtgcatataatgcagacagctgttcggacagtcagacgtgctataattaactttgtgggaattagtcgtagttgtagtcagcgatgacagcacacgcaaagagagacgttcgcaaggggtggctgaacgtctctctttattgtgttgaggagtgatcgataatggagcagtggtatcgggacgcacggagttacttaaaacagtaccgcttttaccacagtgttgttagccaaccatttgaggactggctgggtatcggtaaacctaagaggctgcaacaaatggagttgtattgtcagcgggttactaatgcaattgatagcatccgtgatgaacgtcaagccaatctattgcgtaatgagttcgtagtggcggatggtagccaacgggtggcctatgaactatcgggactaagtaagtcgcaatattatgtcatccgcaagcaagctatgcgtgaatggttgcagttaatcaatcaacacaaataagttagagaaaactggagctttagcgtgttttggattaatcgtaaacactgatatagcaatgccattgaaccctgttatcatagccatagcattgttattttattaacaaccgtacagagagtacgcctgttgtaccgatcctaaaatgttaggaaatgttagggtgcaagtgtaaccggagttacggttgtaaataacggcgcaacaaaaaagccatcctagaattaatcaaggacgactgatgttatagaatgattaacaggtcaggcttacgccaagtaatatgccaaccttagcaaaagtctatcaaaaaatttaatcacaagctaaagaaacgcgatagctacctagcaattaaaacgtcaccatttggcaaggtatactgtccgcctatttcaccaagttcaatggttgtgccgttgagctgagtaaacggtgaatttagtataataatctgcggatgaagtggattaagaaaatcaaactcaaattgtgctttgccagttattacctcgccagtgctaagtgtatgcttaaatagtaaaacgccagcgtcttcgtaagacggaaatttaacatgaatacttttagtggtcaaaggctatcactcctaacaaatttgtcttttcaattctattgtgccagttgtaggccaattgtttgatctggttaacaataaatttaccaatacttaaatttataaaacatcagccgcacttattatatgtattgcccgccagcatgattaatcggtaaatttatgtgttttgaagataaaatgcaccaaaaagtgcaccacaagctatttttattgttgaaaacggcctattatcgttgatatataagcattcttaaaaaatcactgttcaaactaaatagacttgaccaagcgtcactaaaaaaactacaatggaaaacattgtagaaagggtgaacgatgtgcagcaagagtcaaagtatcaaatagaagtggtggcgcctaagcaccgacacatgtctaattgggacatgtttgcaacttggattggcgccaatgccaataatggcacgtggtacgttggtggtgtattggctgcgtgtggtttattgacggcgcttaaagtgattgtagcatcgtccacgctatcgtatttatgtttatcgttagtcggcttcatggggtataagaccggggcggcgacgatgagcttgattcgtggttcctttggtgtgcggggcagttacgttccgtcctttgtgaacttgacccagtatattggctggacagcggtaaacacgttcattgcagcaacttctgtcagctatttattacacgatctagttggctggccagtctatggtaaacccggtggggctaaaggactgatcctcggaattattgtcatgagtgtgttgcatttattgagtgtttcggtcggtcaacggtcggttcagatgattgaacgtttaggtattattcttgtcatcttatttgttttatgggagacggtcgtcgtgttccagacggtctcagtgcatgatttgttaacgtggcaggcgccgacacatttacatatgacggcgggggctgggatggatacgctagcggcgttcaatttgtcttgggtgacagcgggtgctgattttacgcggtttacgcgcaaaaagagtggcgcgactggcatgccatttttaggggcctttaccggcttgttctggttcgcctttatcgggcttgccgcgacgatcagtatcgcgattacttctggaacttatgatcctaataactctgacccgagtaccattgcgagtcgactaggcttgggggtattagcactactggtgattgtcttaacgagtatgacggcgaacgcggtaaacttattggcggctggttcggcgctgtcgaatatcttcccacggattcggttacgaccagcactgtgggccgtgacaatcattgccacgttagtcacactgattccattaatcatggggagttttttagctgcattcacggcgttcctagattatattgggatggtgcttggaccgatgatcagcgtgatgttagtcgattactattggcggcatcgtcagcactatgatatcaacgaactggcgagctctaaggggcagtattggtatcatcatggggtgaattggattgcgctattatgttgggtactaggtgtggccatcttcttgttattgaagcacattgcttggattgcgacggtgactggtgcaaccttcattgacatggcgcttatcggggtcatttacgtggctttaatgcgaattttctacccgttacctgccaaacgtgtctaattggattacaatagataagtaaacgaaattagaacgaggggtgtcatgatgtttaaattaactgagatcgatgacgtattaaataatttaggtgaccacgcagactttgccacgattgccaaaaaagaagccgatttgggcgttcaacattttcaatatgatgttgctactggtgccacaacttactttggtgagaacggttatctcgtggaacggcggacgaatggcttagcagtccgggtcgctcgtgaagaagatgccgcggcagttgaacaaatcgcgaagcaatatattgctggccagctggctctaacagacgctgtcaagcagtttgccaaggctgggtgtcaagcttggactgctaacttaaaacgccacattgtcgattttagcggcgatgaaggtaaaataatggcagctgtaacattctaaatcaataataaagtgcaaaaatgcagactatccacttttaaccgggtagcctgcatttttgcgttccattaagtttaatagccagcttgatgatattgcttgcttaactggcgttctaagctaagtaaagtcagcggacttagccgccgtaactgatcagagtgatagcgcatgactaattgttcgggactattgattgtaatactagtgacgccgtttaggccttgaaaagcgctttgaatggcctgctggagctcgggatgttggggccagacaggggaggtcagcataactagaccatgttcaggatgttgatacgtaatctgatatttgttgagataacgttgaaacatgtcttctgggttcatgagcaattcctcctcggattggttactagtaacggtgagccgcagtttagtttataacccaaaccagacgacccaaacaaaaaagccagccaggcacaatagcgcaataccaatgagtgcccagatcgtaccgttcagctttttggtgtggtgatagtagtaaatactgagtatgccacacagtatggcaagaatgatgctggtgccaataattaaaccaattgtcaattccataaattactttcgactcctcatattatcactttaattgtgcattaaaatgcgataaagtgcaattatttatcaggattcttagtatggtaagaacgctaagcattgcatggtgactgagtagtcttgggtggcttgctgatgagaagccacccaagactacttcaatgataatcgatcgtaaaataaaaaaactaggctgcttatgattaacagcgctagttttgattaatgacagttagttagtcgtttttttagacaaacgggttgcaagcaacaaaccggcgagcgctaaaataaacgtaaagtagaacccgtaatgggcaccgttgacgaacgcgctagcagcttgatgacccccattggcgtagtaagaagcttggccaatgcctaataagctcgttgcaatcgcggttgaaatggcaccaacgacttgctgtagtgtgttcatgattgtactaccatcggcggcaattggtcccgttaaggaatttaaaccatgcgtctgtgaaggggacatcgctaatggcgccccaatcattaagataacgtgggccaaaataacgtaccacgttgcactctgcgtggttgtcagtgccaacatgagggcaccaaccattgaaatcaagaaccccagcattgctggagtgcgggcgccaatcgagtcatataagcgacccgagacggccgacacaattgcgttcatcaagccaccgggtaacatgatgaccccagtcaaggcaacgggaatcaacagccccttttgaatgtacattgggagtaaatacatggctgataagataatcccaaagttaatcataacgaggcatgcgccaacccgaaaaccagagatagcaaatgtcttaaggttcagaattggcgattccatggtgagttgtcgatgggcataccaagccagaataaccagtcccaaaattaaggcacctagtacagcgggcgacccccaaccttgatcactagcaagactaacgccaacaacaaggctaccaaagccaaccattgaaagtaaaatggataagaagtccactttcggccgggttactttcgcaatgtttttaagtgaagtgacggcaaagataaaggcaataatcaagaatgggataaagagccaaaaaatccaccgccatgaagctagtcctaagatggctccagcaatcgttggacccacggccggtgcgaacatgatgactaaaccgaccatccccatagctgcccctaatttgtagggtggaaaaatctgcatagccacggtaaacatgagtggtaagatcaggccagttgcgataccttgaatcattcgaccgaataataacacgccaaagccaggcgctgaagccgaaataatcgcaccaacggcgaagtcaatcagggcaaataaaatcacttggcgggtcgtaaaccatttggtaattaagcttgaaagtggaaggacaatcccaatcataagcatgtaaccggttactagccattgcacagttgccgttgacacgtgtagctgagccatcaattgggggagggcaatgttcagtgatgtttcactaaacatcccaacaaaaccaccaattaacatccccatcatggctagcatgggatgggcaacgggaacgcgggcccgttgtttagcttgcgggctactttgtactgaatccattatattgttcacactcactttcctgaatacaatgggttagcataccagaaaattatttttttcgtaagtgttttttctgaaaaaagaggattgatttacggtagtttgaaaaccatcactcaactagtgcgtctgtgactgcaattgtcggcagtttcattgagcgagaaaggtagcacgtaatggttgttaaaatagtgtttttgtatgtaaataggccacctcagtgtcaaactaaggtggcctattataggtggttgctaagcaaaatcaggtctgcaggcggatcagttatgttcaacaatcgttatgttttcatccaagcacgatggttacactttagcttcgaattggtgtccacattgggggcaagttatccgaacgcgaccatgatgacgcggaatccgaatccgttggtgacactgtgaacagcggaaaaagcggtattgccaatgctgcttgacctggtattttaaacggctgaatgggcgaataatcggtgaccaaaagcgctgaaagccgcgattgatcgcaacttgctgataaatctttttagagaacaaacgccagtaactaataccgatgagcatcacggcaattaagagtagccacccggtgcgaatgaaaaaactgatgacgatcaatagtaaagcgagattgtttaaaaagcggtttaacgtatcgttttgaccgtaccgcccacgcatccatgatcgtagtcgctgtaatagttttgagtttggtttcaaatgctgaacccccgtcactaaaataattaatatttagtagcataacatagtttttcaacagataaataatacctgtttgtgccactaacggtgtatacttaagcatattacagtaaatagagggaaaaacatgtcaacacaatcacaaatcacgcaaacgcaggttctcgatgctatcagccgtgcggcactgatgttggagcgccaagacgcagcgcaaagcgggttacaactgttgctcaatgaatttcggcggagtttattgcagacgagcggacaggccgccacgacggtattgtatcacggcaaaatcaagagttacctattacaacatccgagcaattatccagatagcgtcgcggcgttatcatcattattagatcattttgttgcggctcagtaattagggccgtttttttgcgccaatcaagttattaacctaactagtgatgatttgggtagtggttaatggcagtcaatgttgttattagaaagaaaattgcgctatgctagatggtgaaccatgcgagagtgatagttgcttttttacgtttacggttgtaaactacagttaatttaattcgaagggtggtcaaaccattggaagcacaaactaaaattgaaatcagtgatgccgaatgggaagtcatgcgggttgcttggacgttgggcaatgtcacgagtagtcaggtcgctgagatcatggcggataagatgggatggaagacagcaacggtcaagacactgcttggacggctcgtcaaaaaaggtgcgttacgtgctgaaaagaatggtcgagcgttcaattattatccaatggttgaggaacagccatcgatggatgaggccgtgggcaccctcttcggtcatttatgtcagatgcgcgttggtcaaacgttggtggaccttgttaaccaaacggaattgagtcaaacggatatcgccgctttacaggcagtattggctgaaaaagccaaggatgcgccagaaatggtggactgcgattgtgtgccggggacgcggtgttaatgtggttataaacgaatattgaaataacactgaatgtcatgtttggattttcttaatctgaacatgacattttttgagggaaatgatcttaaagatacttggctaactgaacatggggcattcgtgcaggccttaatcggaaccatcagttatagtgcgcctaatggaagggacttactttcaagataggatactcagaaaacagatgaatggcgacaaaaagtcaagaaagtgtttttcttgacttttatcgtctacaattgtaaactttagccataaattacagatgtagacaatccgactaggggaggtcgctattatgaaagacatggatatgcaacacatggcgcaccatgattcaaatgacatgggcgatatggatatgggtaacggtgagatgatgcacatgggcaatctcaagttgaagttttgggtagcgttagttctgacgattccgattatcattatgagtccgatgatgggggtcaatttaccatttcaaatcgtttttcggccatggtccgattatatcgtcgcaattttaggcacaatcctgtttctatacggtgggcaaccgtttttcagcggtgccaaggcggaggtcaaaaatcataagcctgccatgatgacgttgattacaatgggtatcagtgtggcgtacgtttacagtatctatgctgtggttgccaatgacttgttaaatgcaaaaccaatggtgaccgatttcttctgggaactagcgactttgatcgtcatcatgttgttaggccactggatcgagatgaatacggtcatgaatgcgggatcggcggtagataaactagcaaaactgttaccaagtacggcacataagttagttgatgggcaggtccatgacgtggcaattgctgatctagctaatggtgatcaagttcaggtccgggctggtgaacaaattccagctgacggcacagtgttaaatggtgcgactagtgtgaatgaagcgatggttactggtgaagctaagttagttgaaaaacgcgctaaggatcaagttgtgggtggttcagtcaatggtgatgggacgtttgagatgaaagtcaccgggactggtgaatccggatacttagcccaagtcatgaaattagtcagtgacgcacaggcggccaaatcgtcgcaagaaaatatggcggataaagtggccggactcttgttctacgctgccttgaccgttgcaatcgttgcctttatcgtctggttactcgtgggcaatctggcgttagcactatcaattgcggtgacagtgctcgtgattgcttgtcctcacgctttaggattggcaattccattggtagtggcacggagtacggcgattgcggccagccacgggttactgattcgtaatcgggatgcgatggaacaagtcaaaaagttgaactacgcgttgatggataagaccgggacattgacagctggtaactttaaggtcgctgattatcaaagtatcgccgaccggctaactgcggacgcagtcttggcgatgatggccggtttggaaaatggctctagtcatcccttagctgtcggaattcttgctgccgctaaggaacatcagttaacccctaaggttagtcaggatgttcatcagattactggtgtcgggttaagcggcacgattgatgggcagacgtatcagatcgtttcggcagcttacttggataaacaaaatttagcctatgaccagcaaacgttcaatcgactggcaagtgccggtaactcagtcagttttttgattcaggagcagacagtcttaggttttgtcgctcagggtgaccagatcaagccggaagccaagaacttgatcgatagtttgaaggcccaaaacattaccccagtaatgctaaccggtgataatccgcagagcgcccaagtcgttgctaagcagctcggaattacagaagtgcatgcgggtttattgcccgaagataaggctaagctcgttcaacagtatcaggctgatggtagccacgttatgatgattggcgatggtgttaacgatgcccctagtctggcccgggcagatattggcgttgccattgggtctgggactgacgttgctattgattctgctgatatcgttctcgttaagagtaatccaaatgatgtggtcgatttcttggctctggcccggcgaacgacccggaagatggcgcaaaatttatggtggggtgctggatacaatgtcatcacaatccccttggctgctggtattctcgcaccactcggctttattttgaacccgatgtttggtgcggtagtgatgtcattaagcacggtaatcgtggcaattaatgcgatgacgttacgattaaaagactaaggtaaactgattggcgtaaattaatttgtgcaaatgtgtgtttataatgggtttagatgctagaataatagtatttaaatcaaggatgtgaaacccatgtgtactagtttaacgattcaaaccacggcgggtgatcagtttttagcacgcaccatggactttgcttttgaacttggtggtcgaccagtggcaatcccacggaatcaccactttgacagtgttaccaatgcggacggttttgatagcccgtatagctttgttggaacgggccgtgacttaaatggctatatctttgtcgatggtgtcaatgagcacggggtcagtgctgctgcactctatttctcgggacaagctcactttactcagcagactaaggctggcaaggttaacttggcaccccacgaagttttaatgtggattttaggaaacgtgaagagcaccgctgaattaggcgaacggattgctgacttgaacgtgatggaagccgccgcaccactattgaatattgtggtaccactacactggatcattagtgacaagagtggttctacttacgtcttagaattggaaaatgacggtgttcactacatgaagaatccggtgggcgtcatgacgaacacaccagattttgaatggcatctcaagaatttgagtaattacgtcaacttacaacccggccctcatcctagccgtcaatacggtgacatgacggtgaatcctttcggtcctggaactggggcgttgggaatgcctggtgactatacgtcagttgcacgcttcgttcggacggtcttcatgcgtgaacatacggatgcagtaacgactgatgcagaagctgtcaacgcattatcacacatgctgaactcagtggagattcctaagggcgttaagatgcaagataacgggacgccagattatacccagtaccgcgcctatatgagcatgaatgaaccagcattttacatgcaaccatacgcggatcagacgattacgcgggtcgaattgacaccagctttaatgacggccgcgcaaccgactgaatttgaattaaagacaacccaacagttccggttagcaaactaagttggaatatattagggtcaaaatatgaaagcagcaccgttagcattttatgctaacggtgctgctttttttgattctaggcagaatagcactttcaatgacctataataattattcaaattaactttaataattaaatggtggtacactatattatagtttagggatacgtaacttatactcgataatgattacaaataagccttgcattttctttctgaaagatataacatttactaggtaataatgattataaagtatctacggaggcggcaaacatgaaaaaaagaatgtctttggcacagcgggttaatattttgcgagcaagtgtcatgggagcgaatgatggaattctatcagttgccggcattgttgttggcgttgcgggggcaaccaccaatagtttttcgattttaatatctggactagccgggatgttggctgggacgatttcaatggccatgggtgaatacgtctccgtgaatacgcaaaaagattcacaaaaaatggcgattactaagcagaaggaagcacttgccgatgattatgaagcagaagcgtcgctagtcgtacaaaaatatgtcgatcaaggaatcagtaaaccgttggcgcaacaagcaacccgggaaatgatggcggaagatgcgctgactacgacggtgcgtgaacgctatggtttcaatccgaaccagttcatcagtccgtatgcggctggtattgcgtcgatgattgcctttcccactggctcaattttgccattagtttcgatcacctttttcccaccacgggtgaaggtgttagcaacggtgttggctgtcggaattgcattaatgattacgggatacgttgcggcgatgctgggtaatgctaatcgtcggcgcggaatggttcgtaacgtcgttgccgggttattgacgatgatcgtaacgtactttattggtcacttatttgcttaattaaagggtcaaggggagcgagcttatgcaactgacaaggacaaagtctgagaagaccaaacaaacgatggatgagaagttaaactcattacgagcaggtgtcttaggttctaatgatggtattttaaccgttgtgggggtgctgtttagtgtggcggccgccacgactaatcagttcacgatttttattgctggattatctgatttattagcctgtgctttttcgatggcgtcaggagaatatgcttcggtcagcacgcagaaggacactgaaaaagccgtggttgaaaaggagcggcaattgctgaagacggattttgagggtgaattgcatgctgttcaacgccactatatgactcttggcgtgacggaagagacggcgatggcgattgcacgcgatttattaactaaaaaaccattggcaaccgttgtcagcatcaaatatgatatgcaactaggacactatatgaatccttgggatgcagcgtttgcatcgctattctcagcgtcagcaggaggcgtcttcccgttgctcgcgatgacgtttgcaccggctcattggcagtggccggcaacaattatcgcggtgtccgttgccgtggccttaacaggatatttatcggccgtattaggtaagggcaatgtgaagacggcggtgattcgcaacgtgctcgttgggatcgtgacgatgttcattcactactacgttgggacgctcttttaagtacttctgtcttggtcagttcggactagggattgtcaacagtgaaacaatagctaaccaaacggcacttgaagtacggtgtgctggaaacggcatcagtatgggcgcaaattgttaggatcggtacgaacttaaatagcactggggcgggcaattactgtagttacctgccccagtgctatttagttgagggcggtttccgtgtaattgcgcacaattagtaataaaagttcggatttatcgttgcttatagatgatagaacttgattatgataaagattactgaatcttcctaaaaaacaacgctcgattttcagtgagttttaattaagtctcggtataatattgccattaattaaattgaggtagagcgaaattgaaaaatatgacaactaaccgttatatgaagggcatcatgtgggcgatgttggcctcgaccctgtggggagtctcaggtacagtgatgcagttcgtatcacaaaaccaagccatcccggctgattggttcttatctgtaaggacgttatctgctggaatcattctgttagcgattggatttgtgcaacagggtaccaacatcttcaaagtctttagatcttgggcgtcggttggacaattagtggcatacgcgacagtgggattgatggcgaatatgtatactttttacatcagtattgagcgcggaacagccgctgccgccactattttacaatacttaagtcctttgtttattgtactaggaacgttgctgtttaaacgggaactgcctttacggactgatttaattgcgtttgcggtctccttgttgggggtgtttttagcaatcactaagggtaatattcatgagttggcgattccgatggatgcactcgtctggggaatcctttcgggggtaacagcggccttgtacgtagtcttgccgcgaaagattgtagccgaaaattcaccggtcgtgattcttggttgggggacattgattgcgggaatcctatttaatttatatcacccaatttggatcggtgcaccaaaaattacaccaacgctagtgacttcaattggcgccatcgttttaatcgggacgatttttgctttcttatcgttgctacatagtctacagtacgcgccgtctgcggtggtcagtattgttgatgccgtccaaccagtagtgacttttgtactaagtattattttcttaggcttacaagtgacatgggtcgaaatcctcggctcgttattggtgattgtcgcgatttatatcttgcagcagtatcggagtgatccggctagtgattagttgtaatgatagttatcatttttgtttagtgagggcccttgaataagggctcagcaggacttgaccatttgtgaaatgaccaaaaataaaagctgcgtgtcagaattttaacattctgatgcgcagctttaatcataatttgagtagattaaagttatcttgggggacgatggttggtaagttgtgctacgccaacaccagtttccgggcgggggcgtgcattttaataacttcggcacccaggtcaatataaggctgaccttccgcaatcaatccgaacttctcgtaaaacttctgggcgtgcgtttgggcatcgatttcaatggtggcggcgctgtaatgcactttaagaattgccatgacgtgattcatgagttgcttgccaaggcccgtcccacgatagcaactgtcagtcgttatccggccgaacgaaacgaccccagcatgttcgtaaattcgtgcataagcgacgagttgcccctgatcgtaggcgaagacgtgacgcgcgtccaagtcagtatcatcagggtcttggtaagaccgatcttgttctttaataaaggtcttggcacgaagttgataaatatcgtgcagttgggtggtggttagaccattaaattgcttaacgtaccatttcaaattcaagtgaaagcctccttgaaaactgaagaatatcgccagttattttcaaattgagtctataatttaacacttgtatttttgaccgtcaattgcaaagacccgcgatttatcaatggttacaggtattacttttgatgaaaaaaacatgagaacggattgctggttataccagtgaattgatagcttgattatcagtcatcgttagttaactgtctagatattatcatttttctcataatttgatggataataaaagaaccaccacgcattgcctattgtggtgattctggttgatctttaaattgtttttttgacggcctggtaattaattaataccaagcaggtttgtcaccatcggtattaggtttgttaacacctaaagacgtgcgaatgttacttgtgggatcttgggttaatttaacgacgagtgccgcaatgctcttacgagaaacttcagttcccttaaacggatcgtgtcgctgggttatttcgtagtcgatttcgtccttattagtcaaccacgcagggcgaatgattgtgtagtcgagatcggaattttctaggacttcagccgcggcgtagtagcgcgtcaggtagctacccaacgttgcgttgttccattgaccgaacttgccgggaacttcgtcatagatccctaaagttgagatccaaatgagccgtttgaggccgctggtatgcatggcttttaacacggtttcagcctgctgtttgatgttttgaccagccaaattagcataaacgacatcttgtcccgtcatcgcctgggttaatttggcttcatcagtcgtatcaccatcgataatcgtcacccggtcagattgttggtctgcgacccggctactattacgtaagtaaagtgtcaaattatcagttgtgttggctaaaaattgctgttcggctaaacgagcaatttggcccgcagcccctaagatcaatacatttgtcatataatcccctcctgaacatattaactgtaaacttaattattacagaattcaagtaagcagtttcaaaaaagttaagcaaatttgtgccactttttgaatttagacttataatgaacatgtagcgaagttgtacttcgctgtccaagataaaagaggcgataatcatggcacaaaagcttagcaaggaacaaaaaaaggctatgattcaaaaagccgaagaagaacgtgcaaagcatccaaagaagaagagtggcgtttccggtttcgaaacgatcgatgaagatgctaaaaagttatctaataactaataattagcgtgattcttcagttagggcgagacattggtcgcgcccttttattttgtccaaaatgagtgcacgggatcgcctggtgatgattgactggttcgagcaaaattgcagttggcacggagactgatggtcggttgttagcagtgctatgacagccatccatttgaatagctgtcacagcagtcttgcagtataatagcggtaattaatgatgggggtgacgcaaatggatcaatttacagtgtttatggcgcagcttgataagacgttggcacaagagcaattatcgtctactgatctggtgtacgtgccagtaacctttagcttccataatcagcgcttacaggttgccattaatatgctccaaacttcatttaatcagggtaataatgtatttggggtgcctgatattctggatcgaatcagaatgttggtcggtttggaattagctgattgcccgcagtctcgctggcctacgaagataacgacccagcaactaacaatcacgccacataaaatggtcagggtgatcccagttgatatgcgggcatatcaagtggagtgatttagcactctaatacggagagtgctaaattgttgcaatcttgatgaaagtgcttattattaatgatgtaaacaaattgaaagggtgatttcataatggctaacgatatgatgaattggcacaatgatttatttgatcggttgaatgactggactaagatggacgatttggttaatggattcggtcggacattcttaaatgctggtagtcatgggtcggtcctaaagactgatattaaagaaaatgacgatcagtacacgatgaaagtcgatgttcctggaatcgataaacagaatattgccttgaagtatcgggatggcacattatcgattgctgtaaaacgcgatagtattagtgatgaaagcgataaagatggtaatattatcgcgagcgaacgtcaaactggtcgctttggccggcagtattctttacccgacgttgatgttgacaagatcgaagcacgatatgaaaatggggtgttgcagttaactttgccaaagaaggcagctgcggatacccatcatattgaaattcagtaatggtttatatgacgacttgccgcgattggtggcagggcgtctttttattgtatttatagtggatgaaacggttacaaaaatttgtaaatttttgatgaaatctggagtcagatactcacatctttgctggatttctggtacaatttaatcctatcgatatatcaattgaactgaatattgataatgataggatatgtttgttgtcggatttgtaagaaagtaggaatgcgtgatgacggaaggttttagaccgagtcaccctaagattgagattgacgatgatcctggaatacgggctcaaatcgaagctttgactggtgaactctcacaacaacaattggctaaatgggcgttaattatcgccaagaaagccttgcagtatgttgataaccaacagaaatatgatcgacaattgcgactcgcaattgatgctaatgaattgtggcaagttaatcttgttagtggctaccaggtacggcaggcactggcacgattgactaagttaagtgcaacgacgacgagttccattggtgcggcggcactggactgcgttcgctgggccgtagcttccgcagatgcggatgaaaatgcgctgcgggcctcggaccaagcaattaaattggttaatttaacgcaaccaaatgacatggttgcggtcactgccgagcgtcagtggcagtacgatcagttagctggattagcagctaacattcagcaggggttacgccgtatgctataatcttcacagagattaaattaggtggggatattttatggcaacggtacatgcagaagcaaaggcggagttgttacgtcagtatcaagaaattgtaacgaagtatttaacgaatatttcggaaacagtggacgtgaaggcgcattttgaattaaaaaacgaaccaggatttaattattttgtggattatttgtttttagccaatgtttgttaccaagcgagtctggatattttgaataatgaagatcaaaaatatccagatattaataagcggctagcagaggtcatcttaaaataccccgagtatttgacattggccgttttcaatgccgatttccaggatgaaagtgtgacggatcactacgaaaaaacactcgtagatttggctaacactttggattaatttgtaaataaggtggtcacgaacttcggatagacgaagcctcgtggccttttttggagggttagtaatgattgaatgggatgcggcaacaattaaagattttcagacgacgctattagattggtttgatcacgaaggccgcgatttaccatggcgacatgaccatgagccttaccacgtctgggtctctgaaattatgttacagcagacgcaggttcaaactgtgattccttattatcagcgctttatggcactttttccaacggtagcggacctagctgccgcacctgagtcacagttgttaaaggcgtgggagggcctgggttattattcacgtgtccgcaatatgcaacggtgtgccaaacaattgttaaccgattacgatggacagtggcctcaaactgccgctgagctgacggagttgattgggattggcccgtacactgcaggagcgattgccagcattgcgttcaatgaaccagttccagctgtggatggtaatgcctatcgcgtctttagccggttgctcaagattgacgcggatattgcgaagccccagacccgcgctgtttttgaacgggtaatcagtcagattatttcacaagagcgacctggagattttaaccaggcgattatggacctcggttcaagctacatgacagcgcggcaaccagatacggctcattcgccggtcaaacgctttaatcaagcttatttggatggggatgagttagcctatccggtcaagacgaagaaaccgcggcccaagccggttgcttacgtggcggtattagctaagatgcaggatcagtggttgatgacgaagcgaccgagtaacgggatgttggctaatttatggacggttcccttgattccgattgcagatttagacttagatgatgattaccaacctgaagaactagttacggcggtagaaaattattttaaacgtgaatatcagctccagctaacggcccattatctgaccgggcagcctgtgacccatacgtttacgcatcagaagtggaccattcaaggtttgagtggtcaagttgggttaagtgacttagcctactttgctggtcagacctttacgttgattgagcggcagaaacttccaatgcctaaggttcaagaaaaaatttttgcacgctattcaattgattaattcagtcaacattaaatacttttcacccttcagatgtgctatggttgtggtagaatatagcaaatcaatattgtgacggagggtcgcgcatgttaaatgtatttgatatcgttaagttaacaaagatagaccataaagaagtcgacagtaatcaagtggttgttacagatggtaacggtaagcccaatgcgattttgacagaattattgaatgatgttgtgggaaatatgcggatctttattaacatggaagatgtttattcggtcgatgacttaatgcgcgcattggccgcccatacgccattgccacaagatgtcttagaagaatatgaaaaggtattgcgggaaccgatttataacattaattttgtgccgaaaaggggccaagttgaagttgtgatcggtgaaggctaacgtgattgtcataatcatgataagatgttagtcaactcattgtgatgaaaatcagggccattcgtgggacctgatttttttgtgctgaattgatgatagtggctgtcacgaggactgatcaatatgtggttgcgggaaagtgttggttcgatttaacgataccggcacctgcgttataatggagtcaacttatggtcatgaaatgtgataggttattgtaaatggtcatagattgtttaccgcatcgtacgataggaggagtgctcattatgcaattaaaattagaacggatttacacgaaaccagttgatacggatggttatcgggtgttggtagatcgcttgtggccccggggtatttcgaaggttaacgctcagttggacaattgggtaaaggaaattggcccgtcgaccacgttacgtaagtggttcaatcatgaaccggcgaaatatcccgaatttgtcgatcgttaccgggctgaattggatgagaatcccctgacggccagctttattagtcaagttgctgaacaactgacgaagacgaatgtgatcttattgttcggtgccaaggacgaacaacataatcaggcagtggtactgcgtgattacctgaaggatagtggtcaattaccaaccgcttaatataaattgcgtaatattggtatagatgaaattgggattaggcctgcaataaactgcgctcatcaaattattttaattattttttgaaaacgctagcaattagctgcgaattttgctatgattatgttgttaattaatggcgtcaactattacagtgcacaataatgggggctgcattgttaggcaagcaagattggggataattttatgataaacttatgtgtgttaccaagtaccgcaagttgtcgcaaggcccaccggtggttactcgaacaccggatcccgtttcatgaacgtaatatgaatgcacagccgttaacggagactgaaatcaagcacctgctacagtacacgtacaatggcattgatgatttgatcagtactaagtccaatgcttatcaccaactgagtaagacgacaccgattgaagatatgccattaagcgaaactgttcgggtattaagccaaacaccgcaattattgcggcggccaattatttttgacgatcaccgacttctgtgcggctttaaccaagatgagattcggatgtttattccacgtgaacagcgcgtactcaagatgcaagcaatgtcagaacatcagatggcttaaaatgatcggcttatgagttgatgccgtgtttttggggcgaaacattataaaacagtactacttacttgccagcataaactgattgacacagttaagcggtactgttttgtgtgtaaattgacaaattatagctatttagttagtatactaactaaatagcggaggatgaaatggataatattggttatttactaatgcagttttccaaacagttacgttatcagctaaatcaacggctaattgctaacggattgacgattcaacaatgggctgtgatgcaacaaatcagtctttgggtcgaaagaacggcgcaacagccgactgccaaccagctgtgccacgttctcgatatggaccggccgacgatgtcaggaattcttcgacgcttagctgccaagcaattggttgaacaggacgttaatccagcggatcagcgagcaaagctactacgcttgacccaagttggcatacaagaattgcaggccggtcagcgtattagcgatcaggtcgttgcgacggggcttcagaaattgacggctgctgaaaaacagtctttaagacaactgttaaaaaaactagggagcaattaataaaatgaaaatactggtgataggtgggacgggaaatattggcttaccgttaattcaatatctagatcaacaggtgggggtgcaagttgttgctggtgcccacaatttgcataaagacgagcaactattggctgcgtattcggatgttgaaattcgacgctttgattttttggacgagacgacctttgatgcggggttacggggaatccaaaaggtttttttcgtgcggccaccacaacttgctaaacccaagcaagatatgtggcccttcctaaaatgcttacaagcacaccacattgagcaggtcgtatttgtttcgttgatgggtgttgagcataatccaatgacgccacatcatcaaatcgagcagatgatcgaacagttacagttaccgtacacattcattcgaccgagcttctttatgcaaaatttgaataccacgcatcgcgtcgacattcagcaaaatcacgatttgtttatcccagccgggcggtcgaagacgagttttattgatacacgtgatattggtgagattgcgggcgtggcgttactagatacacaatatttacaacagaaattgactgtgactggtccagaagcgttgacttatcagcaaattgcggcgctaatgactgaatcctgtggtcacccggtaacgtatcatcgaccgagcttatggcggtttcgccgcgtgatgttgaagcggggaatcaagaaggactatgttaatgttatggtaatgctgtatttgattacccagttgggcaatgctaaacgcgtgaccgatacggctgaaaaagtgctgggtcacgccccgcatacgatgacaacttacttacgagattatgcagatcagttacagtagttaggtcgaggagtaggcatgtcatttggcagttgtgggttaatttagtggtgagcatggtcaacaaaaaaacagttacctcattttgaagtaactggtttttagcggacatatccagtacagactagctaattcaagcaaacaggcattgaagtaggatgtctgctgatttttataagcgataacgactagcaaatacaatgcttaggcatacttatgtgcaattttagccgcaacggccgccgcaatcgcaccaactaggtcatcaataaacgtgttaacaacgcctgacttatcagtatctaacttcttaatgacgccttctttaactttatccacgtaaccataattagtgacgccgatggtgccgtaaatattcgccatattaagtgctaagccttcatcaacaccgaagacgccggcgtcactggcaatgatagattggagcggctcgtttagctggccttctgtggcaagtcggtcgagttctaacgcaaccatcgcattgttcaatagttcgcgcttgtgcagtacttcttgcgtctccatttcgcactcttcgatcgttaagttagggacgtattttgtttgtaagttataagtgatatgcgcaatttcatgataagtaatcccttttgaggctaaggcttgaatgacgaactcatacgcagccttatcaggatatttaaacgttggtttttccatagttaccctccagaaataaacaatttgagtaggttagttatttaacctagtaagtccattataacgagatggggggctaaagaatatgatttgggttcaatattcgttggtgcgggttaaaaaggcgattgttgaaaacgatgactggttattttaattgaaacgcgtaaaataagactgttaaacataatgaagggtaagataattttgatgaaacgttggcgaacggtgattcaattgttattgattgtttttgttatcggtgcggctgtgattttagttggggcccggaatcatgataccaagattacgaaagtaacgagtcaattgacaccgcgttctgcacgaatattaaagaatcaatatgaccagtcaaagacagcgacggtctttttacatggctacaatggtggggcgtattcgacgaactatctgattcgtaaagccgaaaaagcgggggctgcccaaaaagcgttagtggtgcacgtgtacaagaatggtgtgatggcctttaagggttattggcaaaagtcaatcaagaatccgatggttcaagttgtttttcaagataatcacgcttcacaaaaagcccagatttattggttacaccaagtcttagtccaactaaaagcgaagtatggcgtcaaagcttataatgcggttggtcattccctcggggccaatgatattgtcaatcaggcattgaagtatgggcatgacaaacgcttaccaacgttgaataaaatcgtgacgattggcggaccgttcgatggcctgaccgggtttctgagcacgcagacggaagcaacggtccggcgcttggatgttaaaccaagtcgtttcacgaagcatttttcagaaatgctcaagtatcgccacaattttccagacaacgtgaaactactcaatgtctatggagatacaaacacggggtataacaatgatggttttgtgggtgtcgcttcagcgcgctcaattcggtacttgttgcgcggaaaattaacacagtatcaagaagctttctacagtggggaacaggcggcgcattgcgcgttgaatcagaatccaagtgtcgctcacaagatgattgcctttttgtggtaagtgttattgtgtcaggatgggtgcattaaataaatgaggtcgttcgggtaaatgctcgggcggcttttttcgtagcgccaaattaggcggtcaaacgcagaaactacagctttggtgacgttttcaataaggaagacagctttagaaaacaaagtattgcgacctattcgtcgttaaaaacaggggttaacagttaaaaatcgcaattaagtgaaagctagagcgtgctataatgacacaacattaaattttaacaacaaagtcattaaaatttgtggaggggtcttatgaaaataactaatgctgatggcacgatccgggcgcttagtaaccggcatgtccaaatgattgcaattggtggcacgattgggacaggattatttcttggttcagggagtacgatttcaaagacgggaccgtcagtcatgtgggtgtacttggtgttgggcttcttcttctttttaatgatgcgggcaattggtgagatgttctattctgatcctacccaacacacattcgtggcgtttatttcccgctatttgggaccgagtgttggtcattttacagggtggacctattggatcggtttgatttttgtctgtatggctgagctgacggctacggcaacgtacgtcaaattttggttaccaaatgtccccgcctggctaattgagattagcttcctgttaattttggcgggcgttaatttaacggctgcacggttatttggcgaagcagagttctggtttgcgatgattaagatcgtcgcaatcgttgcactgattatcactggtattttcatgatggtgggacatcacccaaccccattaggccaggcttcaatcggcaatttgttccataattatcaggtctttcccaatgggctagctaactttatctcggcatttccaatggtcttctttgcttttcagggcattgaatttgtcagtataacgattggtgaggccaagaaccctcaccgcgttatcaaaaaggcggtcaatgaaactttgttgcggatcttgttgttttatattggtgcgttaattgtcattatgggcattattccgtggacatcactgtcacccgatagcagtccgtttgtgcaagtcttcaagttggcaggatacccagcagcggccgccatcattaactttgtcgtcttaacatcggcagcctcatcgctaaatagttgtttgttctcagctggacgtcacttctatcagctagccactgaaatgccagttacgagtcgcatgcaccaaatctttggtcagatttcgaaaagtggtgtgccagcagcagcaatcgtgttgtccgcgatactagtgctagtgacccccatcatgagtttaagtgctgcaacaacggcagtttttaccgtcgtgaccgggatctctagtgatatgtacctgattgtttacacgctggcgatgctggcccaccggaagtaccggctatctaatgactatctggcggatgggtttaagatgccggcgtaccgaatcacgagcccactgacgattgccttttttgttctcatttttgccagtctattcttcattcaagctgatattgtcggtgcaatcggtgcgattatttggacgttactatttggtggcatcacttttgcccaccaagcgcgcttgcgagctgtaacacggtcgtaatcttaaaatgagaattatattataaaatggcttgacgatgataaaaaatggtggtattgttaatcacaagttaataactgtacgataacgttacatcaagtagacatagtggtaggtgtcaggaagccggtggttgctgcgaaccggtcagctactatgattgaaatacggtaaccgagtttcgactgaacggataataactagaaccgttatcttctagtgagtggtggattaagtgtcaataatccgcaacctgggtggtaccgcgactagtctaatcgtccctgttgttcatatgaacaatggggacgatttttttgatgaagaggatgagaataatgacaaatcaacgctgtggtgggattgcacgatattaaaattttgatgatgaatatgcgtcactggaattttatcaatcgaaggggtaataaattatgaacaaaacaaaagcaccacaaattagtaccttagaagcagtcattgtcttactggtcgtcctcggaattatgagtgcgggtgtgattggttggggattatcgccccaagttcccgtattactcgcaatgggcgttgtcactgcttgggcgatgttgcgcggttttccatggtcagcagttaatgccgggattaaagagggcattgataaaggaatcgtgccaatcttcatctttattctcattggtgcgatgatttcaacttggattgcggcgggaacgattcccacactcatggtgattggattcaaaatcattaatattcagtggtttttgccatcagtctttattgtttgtaccctagtcggtgcggcggtcggcagtgcctttacggtaacatcgacggtcggaattgcctttttcggcatgggcgtgaccatgaatctgaatccagccttagttgccggtgcaattatcagtggtggaatcttcggcgataaattatcaccattatcagaaaccaataatttagcttcagccgtagtggatactgatctttttacgcacattaaacatatcttatggagcacgctaccggccgggctcatttcattaggcttgtttgctatgctggggcacagtaatacggagacaagcttagccaagatcaatcaaacagttgcggttttaaatggtcatttcagtatctcagccttggcattattaccaatcgtcttagtcttcatttgtgccgggtttaaaatgccagccattccaacgatgcttttaaatatttttatttcggcgggcttgattctatttgaacagcctgagttatcactggcgaagttaaccgccattattaacacgggatttgtttcgaagacggggaatacgagtgttgatacgttgctttcacggggcggaatcgtcagcatgatgagtatggtcgcgttaattgtggttacgctatccttaggaggattgttggtcaagtttggactgatcaatcaaattatgactccggttgctaagcacttgaatagcgatggcaagttagtattgtcgggtgtattaacttgtattggtgtcaacgtgtttgttggtgaacaatttctttcgattatcttaccagggcgcgcttttcgccaggcattcaatgatggtggcttatccggaaatgcactggggcgggtccttgaagatggcggtacggtaatcaattacctagtcccgtggggcgttggcggcgtcttcctgacgacgacgctgggagtaccaaccgtccaatacttaccatttgttttcttcagtttactttgtccagttatctcggtaatcagcggtttcactggtgttggtatggcgcacttgaatcagcgaactgcagtgaaaactaagcatgtgactgcaacggaggtttaatcgttggtcgatcagttcactttagggaaggttgacgaatggctgttaaaatagttactttatgtgggtctagaaaatatgcggcagtatttgaaacggttgagctggctctgagtaaacaaggtgttattgttttaaagccagctttcagtgatgaagtattaacaccgattgagcttcagaatttacgccagacacatttgaaaaaaatcgacttggcagatgaagtagtagtcattaatgtcgctggctacattggtgagcggactaggcaagaaattggctatgcacagcgtcaacataagagaattcggtattacgcagttacggaaaacgagcattaattaaaatgaccagtatcgaagaatatcgatactggtcattttgcgttgatttagtaatctttacttgagtttagtagccgcttgaaaatctgcgtacatgggatggttcaaattgatcccgcgtgatttggcaatgaaccaagctaagacttggaacgggataatcgcaagtagtggggctttatacggatcagcaacggcttcgagctggagggtttgatcatcattgatggtcggctggtcaccagtgagactgatggtataaatgtggggcgttaatcgcgattcgtacgtcttgacggcctgtaattgggtcatgacagctggatctgtattgatttcaagatagaactgacagtgatcttcatgcgtccccataaagccaccgtgggtaaatgaggctaatgagtaaccatgcgttggtacccggaggatttcggtgaatttggcttgcatttcagttagtgttccagctaggacgttagcaccgatagctgtaaattgaggggcgttagtgaaatcaatagtgaacttacggtagaagtcgttcgcccgttgaacagttggattcatgctttcaatcagaaaactgaactcgtctaattcttgattgattgctaattcggttaaccgtgcttgaagggcagcactgcggacggcaagcaacattaaagtgagcacgatggcttgaaagcttagtgtaatatagggcactgattctttgccagttagtaagtcacaagttgcatcggccattgcggtcagagcagtcgatttttgattagtcacgataatgacatgagcttgactggccgtgtgggctttttcgattgccgcttgcatggttggatcatcatcttttagagaaatcccgataacaacatcgacactgggatcagcttcctcataagtgacgtagaggtcggccgcagcaatggtcacttggagggcggccgtcttttgcatgtataagcgggcggtgttggcggcgttgagtcttgaaccagttgcgaggatcaaccagtgttgtggatgatcaggggtggcagtcaaggccgccgtaatctgtttgggataattggttaacaaccgctctagtactggctgttcccgacgaatgtatgagagcatggtcggattattcatcatcatcaaaatcatcagctcctaaaaaatagttatgtatattaatattaatttagctttattgtaaacgtaaatgaacttatagtcagcaaaagaatgtttaaaaatatgactgttgattaatcgtagcgggtccgctttaaatcaaaggcgactgctcgcaaatcattataaaagacgacttaacggccgacggttttattcacgggcttgccattatcggaacatgttgcgtttcaatgtacgcagaacaacatcctaatcagcattctggttagatggcgtcaccagtaagggaccttgtcgcaaatcgtatgccgttcatttaaaatgccagcgctgtttgtggcagacccgacattgatttaggtgaatattcatgtctagttctaagttcattgtaccaatcatttatgataattagggcttgcatgtaactgaaaaggctggtaaagtaaggaacaatttatcaatacaactaattgcctatataatgccatgatatggatggcgagtttctacccagtgccgtaaacactggactataagcgaattgagtcgatgggtctacactgcttaatttgccgtgtggacccgtttgctttctccgtaggcagactgactagtgaggagaaaataacgatgacgaagacagttgaaatggtgattactggtgcacaagtgttaaacgtttatacccgtgaatttgaagccaccagtttgtggatcgatcacggccggattattagtaacttgcgtgacgagccgtacatagcggcccagcatgtcgatgcgaccggtcagtggatcgttcccggcatgatcgatgcacatgtgcatatggagagttcgatggtggcacctagcgagttgggaaaagtcttactacagcacggcgtcacgacaattgcgactgatccacatgaacttgccaatgttgcgggtattgctggcattcagtacctaattgatgatgcgcgccaaacaccactagatgtctgttttatgctaccgtcatcggtaccgtgtgttccctttgatgataacggggcaacgctacatgctgctgacttgcgcccactttaccaacagtcggaggttcggggactggcggaagtaatggactatggggccgttgcgcgtggtgatactgacaccctggctaaaattagtgatgcctatgcgtatggctatcatgcggatggtcacgctgccggtttgaatgcgcaccagctcaatgtgatgcgcaatgcgggactggatactgatcatgaatgtatgacagtggcggaagcacaggatcgtgtgcgggctggtatggctgttttcttgcgtgaagggacggttgaacgcgatgttttgccgacgattggtgcagtgaccgaagctaatgctagccggtttgctttttgtacggatgataagacgattagtgacttgctcacagaagggtcgattgattataacgtgcgcctagctatgcagagcgggatgcgtcctgaactagcctacacattggctagtctcaacggcgcgatggcgcatcgtttaagtgatcggggtagtctgtcagccggacagttggcagatttagtggtcttagatgatctcgaacacgttaggattgcgcggacgatgaagcggggacagtggatattaccaagcacgacaaaaccattgccgtttactgcaacgcgtgttcagcaccatgcacaactagccgacttccaattaccactagcgaccgggttggcaaatgtaattggtgtgcagccgaaccatatcgagacggatcacttaacactcccgattgatgcaacgcagaattttgaagcggattgccaacgtgatattctcaaaatggttgtcatcgagcgccatcataacacgggcaaggtgggcgtcggcttagttcatggcttcgcacttaaacagggagctatcgctggtacggtggcacatgatgctcataatattgttgcggtcggaacgtcggatgccgcaatcttacgggcggtagcccagattacccaagataacgggggaattgcggtcgttgacgatgaacaagtgctagcgaccatgccgcttgccattgggggcttgctgtctgcagcgagctatcaaaaagttgctgaacagttggccgaacttaaacgagcgtatgaggtcattagcgagcggccacttagctttgatccgttcattacgctatcgtttttgacattacccgtgattccaacgttgaagttaacggcacgggggttattcgattacgcgacctttgactttattccagttgcgattcaggataaccagcgtcaaacagtttaagtgcaatcgttcggtgactgaaattaggctatgatgtgtctgctactgaacaacgatgtagtttaaggtttgtgccgaaatatgtttaaagccccgcaatagctaaacgttttagttagctgctgcggggcttttactgtggttttaatgggctaaatggctgctactgtgaagcgtcattaatgcgggggtagctaatgggattgccactctcataagcgggaagatcagcgattccgcggtaaacggctcgttcaatctgctgcagcccgccgccatcagcaatcgtcattttaataccgtaatgcttgacagctttattcagtgttttggaagtggcgtgtttattctgattctgaatcatgaccacgaggtctgcttgaccgatttgccggtaatagaagttggtgctattactgtgtttaaaagcatcaatcaataaggtgtgcccgttgtgctcatcaatgagttgcgtgatctgtgttcggcgcgtaccaacgtcgcccatgacgatggcaactgttttttcgtgcagatcaaagtctaaggtgcgcagcgtcactggcacggtggttgtgtggatagtggcctttttagctggtttggctgctttattcgaggtcggttgactcgagctatgatgaacgtaacgaataaccaccttctcaggccgctccttataccaagccaggtcgactaattgaccattactgatgcgctgatattgcgcttcttgactagtgaacgtaacatcgttcattgccggattgagcgacgataaggttgtgccgttataatcttgttcgatgtgataagtatcatcggtgtcttgataatgaacaacgaaaaatggtgcgacagtaatcggatccgctgtagtagcgtgactaacgattttatcaatataaggttgtcgatgttgccgtaaattttgttctaacaggacctgatcatcgtggtgaatcaccagttgtcgggccaaaatttcatcgtagtggtagcgtggtgtgccggtcggatcattggggtcgactaaatcaaacccctttaaatcgcgctttacttgcatgattgtttgcccattggattgtgcagaagttgttttgacggatgatgatgaatcttccgcgtttgcttgcgtagcgtggccgctggtctcattgtgtgagttactagtggctagtctagctatgcgtgcattatccgaatctacgatggtatcaggatcaagcgccaggtttaagatttcctgaatcgctttggcacccttggcgaggccttcatcggtaggtcgaatcatggtcaatgttcgggcaatggcggtacgataatcgcgatattttttcaaattaggacctccgttattatttagtaaattggtcagcgcagacatggttctgtgctggctaaaaagatatttggtacagggtcaggtcataaccaacgatatgtatgtgttaataccacgagccaaaatgattgtgttatgctggtttaaagaaccaagtaggtcatcaattgccagtacttatcaactattgtgccatagattgtggctggacgggtataaaaaaacaataaaaacgagttagtgaagtcttttcaagattagctgagctttagcgcaagtattggctgattggaacaatggcaattgttgtgaaaggtcggcttactaacacagcaatggtcaattgaattggccttacgggtgattacttataaaatgatatagcggctatcagacgacaacgagtgcgttgacttgtttgtggattgcaatagtcgagcatcacattcaggataagtgggaatgaagttggaggcgcagcagatggcaagagttagatttgagaataaacgggtcaatatgagcaaactcagtcagtttggatttgaacccaatcagaatggtcagtatcagttccgaactttaattatgcaaggccaatttgaaatgataatcgagttgaacactgatggcagtctgaacacgacattaacggatacgacgactagtgaagtatatgttttacacctgacatcccaagcccatggtcagtttgtaggtcaagtagcgcaggcttatcaagatgttttatacaacatcgaacagcattgttacgataatgacgtcttccaatcgaccccggagcgtaagctgattgcgcaagtcaaagctgtttatggtgacgatcttgagttcttgtggcctaaatttccacaaaacgcggtttggcgacgctcagacacgcacaaatggtatggcgcattattgacggtaacttccgataaactggcgttgccgggcgcaacacatgttgtgacggtattagatttgcgagcgcgcccagaagacttatctatgctgattgatggacaacattatttaccgggctatcatatgaataagaaacattggtattcaattttgcttgatgatgtggtaccacttgccacgattatggacgacgtaaaagttagttatatgttggccaagtaaggcttgaatgtaagtggacggtctcaccctaaaccgaagcattgagcattaactaaaaaaatcgttcccaagaagacatctgggaacgatttttttgattaatgattggtaaaaccatcgttagtgactattagattgaataattagcgcgaggcatggtgccgactgcggtaccaatcgaaggcgagcgttaatagcatgtaagcaaaatcaacgagaattgcttcttttagtggtacgttgagtaaaacgactgaaacgaacgttaaaacaacgacaaaagtcagtgccgattgtgcccatcgtaagagccattctggcatggttagctcacatcctttgttatgggagttgtggttgttgatgagactgatgattgtggccgatcccgtaatgcacgtagcgcccaaagaattgagaccgtatcaacaacttcttgaagcatagcgccaaagagtgccggaatgataccagtgctggcaatcaacatcaagatcgtacagatagcaatcccaatccaaacggcttgtttagccacttgcatggtatctttagcaatgcgcaccgccgtgaccacgcgactgagatcgtcttttaagatgacgacgtcggccgattcactagcagcagttgagccatgggcgcccatggcaatgccgacgtcagcaacagccaaggaaggcgcgtcattaacaccatcaccaaccatgataacggggcgttcggccgctggtacagcctttaagtgggcaatcttatctgcgggtaggaggtcggcagcaacggtatcgataccgacatcggcggcaatatgatcagcaattgcctgttggtcaccagtaagcatcatgacgttttgaacgccctcagcgtggagtgcttgaagcgtggcggctgcttcggggcggacattgtcgataaacgtgatgtaacccgcgtactggtcatcgatgccgacgtagatagcagtagtagcaagtggcttggcggttgtagtcggtgcgacgaatttaagtttgcccactttgacctgttgctgctcaatcgttgccgtgaccccattacccgttacttctgctaattgtgttgccgggctgaggctagtggcactcgcatacttgacgagtgagcgggccaggatatgacttgagttttgttcagcgctcgctgcgaggtgcaagatttgttcggcagtaaaaccaggctgaggaacaatttggttgactgttaattgaccactggtaatggtccccgtcttatcaaacgcggcggacttagccgtagataacttctccaacatgtccccagtcttgaccacgattccgttccgactagttcggctcatccctgagacgagtgcaacgggtgcggcgagaatcagcgggcaaggtgaagccactacgaggacttctgcaaatcggtggggatcaccgctgaatgcccaagctactccggcaatgacgtatgctaccaaggtgaatgggactgcatagcgatcggccagccgtacgaatttggctggtcgtgattcggattctttaaccaatttgactaactgttggtattgactatcaatggctaatttatcaacaaccattgtaacggcactatcgccgttgaccgcaccagacataatgtcatcgccaacgtgcttgtcgactggtttagattcacccgtcaatgaagattcatcaaagagtgccgttccttgaataaggtgaccgtctactggaactagctcaccaggtttgacgactagctgatcaccaatttggacatcttcaacggcaatatctgttaattggccggcgactgagcggtgggcaatacgtggtgaattatcgagcaaggctttcaattcggtattcgctcgtttggccgcataatcttctaacgagtcacccccagtgagcataattagaacgacaaggctagcccaatattcgccgacagctagtgttgccacaatcgccgtaattgctaataaatcaaccccgtacttacctgaacgtaaggttttgatcatctcaactaacattgataaggccataagtgaccccattaatgtaatgatgatttgtgctgccaattggtagtgcaaaccaaactgtaaaataaccgcaatgataccgacgctgaccgttaaaattaatttatagtagtgccgcatgcagttcccctccttttagatgataacgtttttttacttgttacaagaataacatgaaatcggtttaattgaaacagataagaatgattctaaactaaaaactaattattacgaaaacttttaaaaagtttcagaaaaaatatgggtgtaaaactcgtctaatccttgacgggttaggcctcgacggctcaaaatggttgattttacttctgatttaatactagtatacttataaacgaacatcagatatcagaaaatactgaaatcagcatttgtataagccaacgtgcgctgtgcaggtggtaacttgttacccggtactaagcgcttttttggtgcaccaagcaattaatctaacagttgtgcggtgggcttatctggtgattcaagggggttatctattagcaagagcagtgtaaccattaatcgttacgtggtgtgacgacggtcgtgtgctaaaggcacgatggtaatagaaacactagctaaacaagatgaacaccaacgtcgattaagcaattaaaaatcatttgtcagtatggcgttgtccggattcaaccaacggaaagaaggaaattctgctactgattttgagttagcacaaacagaatgcggatgacaatgccggtcaaacctgatacagtcagggtgctgagtgctccgaggattaactcggaggggtgtaccgattgctagtcggaaatttacgcgtggggactaccattgctggtaggaagaaccacgaatttgatctaaatatagagagtatatgctcagtagcaggtttattattttaaaaagtaagaatattgattggtgggtctatttaccaacaattgggctctttgcggcggcttccgttgttttattaatggggggccattcgctggagacgagtttaagtggcatcttgaactggctcacaaataacatgagctggctttatatgtcggtatatgtgatcacttttatctttttcatttacttagggtttagtaagttagggaaaaccaaacttggtgatcctgatgacaaaccagaattttcaacgtatcactggggcagtatggtttacgcgaccgggatcgatgccagcattttaatgttgagcatggttgacccgttacggtacctccaaagcccttcattcggcgtcaagccgttttcaacttctgcatataattatgcgcacatgctgggacaatttaattggggaccaatggcgtggatgatgtttgcgccagccacgattgcaattgcctatgcaatgtatgttaaacacatcaaggttcagcggctcagtgccgcaatttcagtactacaaggtcctggtaagggtaagcaaattgcccggaacacgattgattttctcgttattattgggattatgggtggtgttggtacttcagtcgggatggaaatccccgtcatttcaaaagttttgagtgccgttaccgggattgccgatacgatgactttaaagttagggttatttgccttattattcgtaattttcgccatggctgtttttaatggcttgaagaagggaatcggtcggctaagtgctgcccatgtttggttagcgattggcttcctaatcgttgttttaattgttggcccaactttgtatattttaaactcggaaactaatagtattggcttgtttgtcaataagtttattacgttgagcacgaatactgcaccaaatggtcacgcaacggccatgcaacggcagacgatcttctactggggctggtggttatcctttatgccagtcatgggcttattcattgcccggatttctcggggccggacgattcgtcaggtactcggtggtatgttgctatggggctcattaggttgtgtcagtttctacgccatcttgggtggttatgccttatacttgcaacggatgggcatcgttaacttagttcatatcttaaatacgcaaggacaagccgctgtgattgcagcagtattgtcgaccttaccattgaagatgattatgctggctttgtactgcctatcttgctttattttcttagcaacgacggtatcttcatttgccttcattacctcgtcatttactagtaaaaagttggccgcgggggaacaaccaagtcgtttcaatcggatgagctgggtcgttatcttcctagtcttctcattggggcttgtcacggtcggtggctttgaatcgattcagtccatctgtgcgatgtctggcttcccattaacgattgtcgcgctcgtcttactgtactcgatccatcacgacttaacgactgatccagtcaaggaagctgcgaaagccaatgccaaagcagctgaattagcacgccggaaacggctagcacgtgacgttgaaatcacaactaaaactgactacgcacgcgaacggcgtactgcacggaaacgtgaaacggaagccgattagcgctactcagttgaactaaatatatcaattaaactaggctcgtattatggatttccataatacgagccttttaagcttggcccacctgtttgaaataatggtagaaagatgccttttagggttggttttctgttcgtcagccagtgagcgtcctattccgacctccggggctgggtgacaattgctggaacgcagccgacatcgatttgagctaacgaataacccgcgtcatctcaaatacgagtcttattctaagccggaaggaaatcacttccgactaagaataatttggctactgagcattgtcacccagcccctccagtctcaagccacgggttgaagccgagcattgtctagccaacggattaatgcggtttgggcatttgtccgttggcatagcaagcacagactttagtggcaccgaacacgtttcaggaagccgctcgaatggctgatgaacggccacttaactcggcacaattggtcgttggttattttgatacaggaactttaaacgagacgttagggttaccctaaccactttgttgaggtgttctattattactatagtaattccgaaatagcgagctatcccaatatcttttcgacctaacagttgattaacaaaattactgtttatggagaacaatgacaaattcatcaaaagttgggtacatcttcgtccgccattcgaatactgtcccgactggaaggcgtttcggccaatgctcagcggtgaaattccacttagcaagcgtccttggcttggttagtggaagaccagtatttaagacgtggtcttcggcttaaatctgtgtccaccgcgttccagcaattggcagaaatgcctggagggcggcgtaggacgaacgaactaagcaggtttacgctaaccggaactgtttccagcgggcctaagctggtggctgttgactttaaataaaggcatctttataccataattcaggtgggatggattagaatgatagcgatgatagtaaagggaggattggctatggcgattagtaatgggcatgttagttttaagcggccggcgtggttgggagattcgattacggcgaataatgggttggcgacggtgcattatcatgatattttggcggctgattgggatgtcgagcggagcgataatttgtgaatctctggttcaacgattgggagtcgctacgatgcgatggcggcgcgctatcaagctattcctgaagatgctgattttattgctgtctttgggggcgtcaatgactatggtcggaatcagccgttagggcaatacggtgattgcgatatgacgacattttatggcgcgttaatggtgttactgacgggattacagacgaattggccgaccgtgccgaagttatttatttcagcaattcatattggctctgattttggcggcagttttagtgcggtgactaatggtctcgggtatcgtcagtcagattatgaagcagcgattgcccagatgactgcggactatggcgtcccacatttgagcttgtaccgtgatgcgggaatgacgtttgcgattcccgctcaagcggctatttattcggtggatactttgcatccgaacaatgccggtcatcgcgtgattgcacgcaagctgcagtcgtttttggatagccacttttaggttggcctagtcagtaatgaatggcacagttgatcgtaaataaaagcagcagcacgctaatgggcgtactgctgcttatctgaatctaggtgtcaaaacgggctacttggcttttttcttagtcttgggcccttgtttatgcttctgctcgcgcagcaagtctttgaaggtttcgatttccgtagtgtgcttagccatccattccttgtagttagaatgggagtcggtatcgctgattttaaggccggtttctaaccagaataaagcttcggttagggaaccgaaattatgaaaccagagtgtgtggccgttgtcagagtccatggcaacgtaagacttgtagtggggcgttaaaaaggtatgtttaacaattttgaatgcggcccggcgacgagttaatttgtaatccggcaagatatagcggccaggatgggccagatgtgggacagagttcttacgttgttctttatattcagtcaacatcgctttagcgcgttcgggactgatgagggtgatatcaaattttggcatagcagggctccccttggtgaatagcagtatggtcaattatagtagtcaaataataatacttatactataatgatagcgcaattttatgaaaattcgaaatataaaaacctgaaaattagggattttccctttcttacagtaaatttaagtaaaactaatcggaggtttgattatgagtacagcacccctcagttcatttgaaaaaaatattccggcggtaaccgaattgttagcggttgatgctgaattgcaaacgttctttgtggctttgacacctggttatcggcgcgaatgggcccgctttatttttggaactaaggcacaagcaactaaggaacggcacattgaagttatgaagacggtttttcgagctggctataaatctaagcgagcgtatgatagtcggtcggataaataggtggattttggcaatttgaaatacggtgacggattgcgattaagaattggggtgtagccaccaagatctaagcgggtctgggtcctgatttggtctaattgctgtcaattctgtggctagcaggccttgtgagtgcctctaaagcctgcaattctgcttcccgagcattaagcgtggcctcaattgctacgctgagcgtgcgctttaaccggcttaaacggggaatgtctagactgacatcatcaccataaattgtttccagcggtgtccaccagacgggaccggggttgggcgtatcaccgttatggcgaggaaataagtgccaatgaacatgcgcgtcaccattcccgagtagttcaatgttcattttgtctgcatgaaaggcctgcgcacaagcttcctggacgatactcatctcctcaaggtatcgtaacttctcgtgtgccggtaaatgatgtaattcggtaacgtgatgtttggctaaaaagagcgtgtagccttcaaagtactggctatcagcaaggaccacgtagcccgttgtgagttcgtaaacgaaataaggattctgatgtgcctgaattagtttgattcgttcacagatcgtgcaagtggatgtcattcgctcgcctcctgagtcttgataagattaagtatacgcgtagatgtggtgagtacatcaaaaatgttagtgaaacgtctaaaaaacgacgacctgaaaatcaatcctgatttggggtcgtcgttttgattgtaaaaactaatcgtcaattctgttaggtcgatcgtgattaaggtaaatcgttgccagctgcaaagtaaatgtcgtaccattcttgccgagaaagcgtaacgtctgctccagcagcattttgagctagatgttccggattcatcgtaccaaggatgacttggaagtgggctgggtgccggagaatccatgcggtcgcaatagctgatttagtgacctgtttctcatcggcgagtgcttgcatggcattattaagttctggaaacttcggattgtctaagaagatacccgcgaagttaccgtattgataaggcgaccaagcttgaatcgtcatcttatggagccgtgagtattcgatcatctcgccgtcgtggttaagactacgttcgtcctgcatgttcgtgtgcaagccaaagtcgatcgcaccggtatgcatgataccaaattggagttggttgatgatgagccgttggtttagtgccgcttgaagcatgtcaacttgcatgggattgaagttagagacgccaaagtggcgcaccttgccgctagtttgcaacttgtcaaaagcggcagcaacttcttcgggttccatcagggcgtccggtcgatggaggaggaaggtgtcgagataatcaacacctaagcgttgaagttcgccatccacggctgccagtatgtgctgtttggaaaagtcgtaacgcttgccaggaacgatgccgccttttgactgaatatagagctgatcacgcgatacgtgagcctgcttgagtgcttgaccgaagatggtcgatgattgaccaccaccgtagatatcagctgaatcaacgtaattgatgcctaaatcaacagcggtatcgataaccttggtggcttgagcgacatccaaggcgtccatgcgcatgatgccaagcgccacgctggaagcttgaatattgctgtgacctaaattaatcgttttcaaaactaaagtcctcctcaatgtgcaacttgatttaaattcagtatacggttttcgtaagaggatgtaaacggttacgactggtgccgactgttggtaaatctgattttagagcaaaaaaaatagaacccaaggcttctctacttgagttctacttatgaggaataatcctgattagcaatgaaaaattgttcagtgttaatatgatacaccttcatgctattcaattttacgcgtgtccaacttctaacggactaacccgtatttattgtaactatctgctatagtcgatctaaagtaaggttgttacttgattgcgactcgttagacgggttttaacgaaagtcaaactcgcgtttaaaacttgggaatgtcttcgtaacagacatgcacctccgtttaaactttgtaatacctgagtctacaaatggaactggtaatgtggaactaacaactggtcatcggagacacctgtttccaactaaaacttagttaaaatctgttcgtcattctaatgccaattaattctttgcggttatcgtttatctaagggtcaacgttcagtcatccaacgtaaatctcacgacactcgctagaccgataacgcttcacggcgcttaaaacggtttcgataacgacccaaactgtgatactagctgtctaacattacagcgacagccaaactcttttgagaagctttgctaatcgaggattaattcctttcctcacttagtataatagcataaaccgcaaacgcttacaacaaaaacaaccgcgaattcgcaataaaaatcaatagtgactcaaaacgctgctatatcggggattataataaattttttcgagaaatagtcgcataatttgctgattgaccgatcgtttgaaaagtcggctaattagcgctaataattgattgaatatgggctgacatacggtacaatagaagtagacaagaaagcgctttatataacgatgacgtgtatcaagtgtggtggcacttataccgcgaaacgttggcgtgattaatcagtgaattcaagctggtatggaaggacgagatacgatgacaacaacgtttaaagaccgggccttcgaggcgctaggacatgtcattgaccctgaattaggaattgatctagttaacttggggttgatctatgatgcacaattgacggcggaggggaccgctgaaattaccatgacgttgaccattgcgggctgtcctttgaccgaatggttggctaaggacattcacgatgaactgatcaaattaccagaagttaacaatatcgagattgagattgtgtgggaacctgcttggaacgaaagtatgatgtcccgcgaagctcgaatggaactaggcattcatagttagtggccggcctgttcgcagctagttcaagggctgacggtcattggatagggcatgattaaggaaagacgttgctggtttaggcttgcggcgccttttttgcgtgccactgtactaattccagccagcaatacgtgcatgcgtcgagccagcaaaaaaacaccagtgacacaaccatccgtagacgattgtatcgctggtgttttagtcatgctagaaatgccgatttaaagttttggcaatggcatccatgtcttgtacccgttgtaatcagcggtgtgcagtagtttttcggcatttgccacccgatcttgggttggagactcgattccttcaagccggtacttgatcttcatttcatgatattttttaacgcccaaagtatggtacggcaatacttcgactttttgaacgacgtcgtttggaatcttagcaatgtaatcgccgagtttcttcaagtcttcatcgtaatcagtccgttggggaaccaggacgtgacgaatccacatatcatcgtggtgttgggccatgtactgaatcatatccaagatattttcgttcccatactgggtcaactgcttgtgtttggcagaatcgatgtgcttaatgtcgaccaacgaaatgtccgtgaccttcattagacgttcgaacttgtcaaagaaaggttgttctcgggtaaaaggctgtccagaggtatccagacaagtactgatattcatcgccttggctttttcgaataagtctaagatgaagtcgatttgtaccagtgattcaccaccactgactgtgatgccacccgtcttgccccagaaagcccggtatttagccgcgtcttcgagaatctcgtcggccgtcatttgatcgccaacgttgagtttccaagtatcagggttgtgacagtattggcaacgcatgtggcatccttgaaggaatgccacgtaacggatacctggtccgtcaacggagccaaacgtttcgatggagtgaacgtagcctatcaaaggctcctttgccgccgcttgcgttgttgaaacttgtttgttttccatgagcctttcgccttcttaactattaaagattaaatgttacattgattcgaagaatgtccgtgaaataacgtcatcttgttgttccttggttaaatctgcgaagtagacacagtagccagaaacccgaaccgttaatgttgggtattcttcagggtgtttctgagcatcaatcaaagtgtctttattgaagacgttgatgttcaagtgcatcccatcgttcttcatgtaaccgtctaacatgtttactaacgtgtctttccgtgattcgaggtcatggcctaacgtgttaggagtaacgccgaacgtgttggaaatcccgtcagttgcgtaacggtatggtaatttggcagttgaaagaagtgaagctaatgcaccactcttttcagcaccgtatgcagggttagcacctggtgagaatggttcgcctttttgacggccatttggtgtggtaccagtgttcttaccataaacaacgttggaggtaatcgtcaaaacagaagttgaaagtttggcattccgatagaggtgatgcgtgttcatcttgctgtataattctttgactaaccatttagcaatgtcatcagcgcgatcgtcattgttcccataacgtgggtagtcattgtcggctttgaagtcaacggcgataccacgttcgtcacgaattactttaacgtgaccatacttgatagctgagattgaatccgcggcatgtgataagccagaaatcccagttgcaaaggtccgatcaagatcagtattcttcaaagctaattgggcagcttcatagtagtacttatcatgcatataatgaattgcattcagtgagttaacgtaagtgtcagctaaccaatccatttgcttgtctaatttcttcatgaattcgtcgtaatcgatgtattctgaagtaattggttcgtaagcagggccaacttgatctccagcaatttcgtcgcggccaccattgatggcataaagaatcgctttggctaagtttgcccgggcaccgaagtactggattccatcagcaattggttgtgcggaaacacagcaagcaatgccataataatcggtaccccattgtacccgcatcaagtcatcattttcatactgaatggttgaactgtcgattgaaacttcagttgcgtaacgtttgaagtcttctggtaagcggtctgaccataaaatcgtgatgtttggttctggtgcggcgcccatgttgtccaaagtctttaaaatccggaaagcggtcttagtcacatggtgttgaccgtcgacgcctaaaccacacattgataaggttgcccagattgggtcaccagagaagagagaattgtattcttcagtacggatgaaccgaaccatccgtagtttcatgacgaattgatcaattaattcttgagcttggctttcgtccagaacaccattgtccaagtcacgttggatgaagatgtccatcgttgtatcaatccggccaacggacattgcagcgccgttttgggtcttgatagcagctaagtaagcgaagtacatccattgaatagcttcttgagcattagttgcaggcttgctaatatcgtagccataactggcagccatcttcttcatatctgctaaagcacggtattgatcttgaacttcttcacggaggcgaataacatcatcagtcaattcaccatcaccaatgtgggcaaagtcattagctttgtcttccattaaacgatcgatcccataaacagcgacccgtggaagatcaggaatgagacggccacgtgcgtatgcatctggtagtccggtgatgatcttgtagtgacgtgctttccgcatgtcaggagtataaacatcgaagacgccttggttatgagtcttgcgatattcagtgaaaatcttgtcgttttcttcatcaggggtataaccgtatgatttcaaagcgtcatcagccattcgaataccaccaaatggcatgaaggcccgcttcaaaggcttgtcagtctggagaccaacaatcttttcgagatctttttgaatataaccagggccgtgtgaagtaatcgttgcaacgactttagtatcagcatccaacacaccaccagcggcacgttcttgtttctttaattctaagactttgtcattcaaggtcttagtagcggctgttggtccggccaggaagctttcgtcgccattgtactgtgtgaagttattttgaataaaatcacgaatgttgatttcttcctgccagtgcccgcctttgaaacctttccaagctgctggttttgttgtcttttctgatgtaatcattttctcgcctccataatttgaatccaatcaaatgattgataaaattctatatttgaatcataacattttttgctggatttgtaaccgctttcaggtgatttatttcacgtttgggttatttttttgcaatctattattgaaaagttgactattaacgttgatataacagtacttacatagctagataggcattggtaattcacttaattatatttagaaaacggctaaaaacaagacttgttttgatatataagtggaatattgtccataatgtaacaagtgtttaactagttaattaataaaaagtgcaacgaggtgtggagggtgttaaaagcgtttgccgttgattttatgaggaagttcgttatcataaagaagataagcagaaactagtgaatgtagtgaaaggtgggcgtaatgcggatgctcgaacaaattgaacaatatattgacagttgtattgaagctggcgacatttatggggcgtcgtttagcttgatcacccctaaaggtatcaatcaatactatcatggtaagcagggccgcgatgagtttgccgtgggcttagatcctgcgatgatttatgacctagcatcggtaactaaggttgtagggaccacgacgaggatttttcagttgttatcggaccacacgattcatttaacggactcggttgcccggtctttacctgggttcactcatcctgaaataacgattaaaaacttgttacttcataatagtgggctaccggcagatattgataacctggataagatgcaacgtgaagatctgatcaaagcggtttatgatgcgccactcgtcacggcaccagggacaacgtatgtctattcagacctgggatttattttattgggatggattattcgtgcggttgacggctcattggctcggagtattcaagaccacgtttgctatccactagcgatgaccaatacgggttataacttaaatcgtccgaagattcggtttgtgccgacggagtttgatccgcggcggggtcagattcaaggacaggtgcatgattataaagcctttttgttgaatggtgagagtggtcacgcaggcttgttctcaacgctgacggatttatccgtatttattgaaatgatgttaaactttggtgaatatcaaggcaaacgggtgctggatgaaaatgtctttgactggttaggcgagtatgacgaaaatggccggacgttaggttgggaacgacgtgcgggacgacatcaatatttccatactggttttactggcccggcagttgcttttgatttggatcgtcaaattgggctggttgtgttaacaaatcgagtttatccaactagtgacaatcaggtctggaaccaagatcgtaagcgagtattcgatctgttttttgaatcctgatgatggcagcttcattaatagttagtagttaaattaaataagcgtcgcagccacttaaggctgcgacgcttatttaattacgatttcatgacagctagaccgctgaagtgtttggcacttgtgggtgctaagcaaacgctattttgctttttgcttctatatatacgttatttttgcaaccagcgaagtccgggaacatgacgtgcaattttataaccagcggcaccgataatgacaccagcccaatttgtgatgacatcatcgatatcaacccaacgtttgaggttaaccaaccagtcaaggatgaattgtcccagctcgagtgttagccccgtaagaaatcccaaccaaataaaacgacgccagggcaagtcgggaaaattccatgccagtaaaccgcccaatggaacagtgaggagaacgttgagccaaaattcaatgtcaagttgttggaaaggaatcacgttcagcttaacgggtccccattgaatatattgaataacgagttgggtaccaaaattgtaactggtaggtgtgtagcaaaaagcagttaagacccagagaaaggcaattaaactgagttgcttaaaacgctggatatttgtgcgcgctgatcgcgcacaagcgtatagtagaacaataaacattaatgaaatcaaaaagaatggtagccaagctagcataatttagtcgctcctttaattaaatagtatagagaaagaaagctggtttgactattaataaaaagaaattcagaaaaagtgttgacactttttacttcaattggtatattagtaagcgttgctgctacggcagatacatctcaccaccaaataattattgaaattagttgttgacaacttcttcagtaattggtaagatagtttctgttgtcgcaatggcaaccacgacaaattaatcaagttacttcttaaaaaaagttgttgacaagatattgattaagatgttatgatgattaagttgtgttaagcgattaacacacggaattagatctttgaaaactgaacaaagtttcgacgaatcaaatgtgtagggtctcttggaataagcgatgaataaacttaattttttaatcaagaggtgattgtcatggcaacaacttacggcattttctataacggacaagcgggtaatgggcaagcggcaaccgtcgcccatcaaaccgcgcaagcgctatcgaaccacggcattgagtctcaattactgacaacaccaggaatcccccgggcaattgcgttaattaagcaaacgcttcctcaactgtcagcactaattattgttggtggagatggcacactgaacgttgcaatgacagccctaatccaagctgaagcacatattcgtatcggcgttattcccatgggaacggttaataattttgcaacccgctaccagttaccaactgacccccaagcggccatcgaactaatttgtactcagccggcaacccaagcagtcggcatgctagtttgtaatcaacgccgggcagtcgtgagttcactgacattcggtaatttggctgacatttccaatgaagttcgacaatctgagaagcagcgattcggtaaattaagctatctttaccgtgctattcgccatattggtcacaataagtcactgccaattcgatatcaattcaaacacgaaggaagccacaccttaaaaacatggttctgtttgattacaacgaccaaatcagtcggtggacacgtctatagcgcgtctgctccaggaaaaatgcatattagtctacttaacaacattggctggcggcaagtaattccatatttttggttcgcactaacggggaacttgcaaaactccaaggccattacacagctaacggcaaccagtgcacgaattacgagtgcaactggtcaagccgtgacgacacgtattgacggcgacccagcggttaaactaccaattgaattgacctatttgacggaccgcttcgaattgatcgtaccagcagtcatcgaataacgacgtattttttattaatataatcaacatattgattgcgtactattaactttttgattatagttaaacatagttattaattaatcccaattaacacagggaaaaaataataatgttcacatcataactttattggggggattacgatggcatctgcttatcgcaaattttgggacaatcttttaaacttttcgggtacagcaacacgctctgagtactggtggcccgttatcattaactacattcttggtggtattatcattgcaattattcagatgattatgggacaccccatcgaggatatttacaattggagcgatctgagtgttaatacgatgagtaaactcatcgcattaatcatttggttaggaacactctcgttgaagtttcggcgattgcatgacagtgatcacactgcatggtggattttaattgacttagttccaataattgggaccatttggttcttcatcttaatggtgttgccgtcacgctcaaatcgttggcaataatttaactaggcgcaacttttattggctaagcggcccataatggttgcgccttttgtgactgagcgctggcagttaatcatattaatagacgcactaattatgtgaatgttatcattaatataataaataacatcatttcatttaggaggtcctgaggatgtatcaaaatattctagtcccgcttgatggctctgataatgcctacatggctttaaaacacgcggtcaaactagcccagacgtttaaatctaaattatttctggtcaatgttattgatattacacgcctgaatgcgtatagtcctgcagcttacgggggaacgctatatacaaaccttctaaaagtcgcaaaagataatagtcaggacattctggatcgtggtcagcaaatggcttcggcagcacaagtcgaatccctaccaattcaagttaatagttcaccaaaagctagcattgcaactgatattcccaaaaaatatgcaattgatctaatcgtcatgggcaaatccggcaccaacgcggtttctcgaattttgctaggctcaacaaccgcgtacgtcgtacaaaaagcggaagtcaacgtgacagtcattaacacaattgacgaccctgattagacgactaatagaaggaaggaaaaatcaatgatcaaagaacgccctaaattcaattggcttcatctgctcattttcattgtggtcgtcgaagcaatcggtagtctgtcggcatggctcgcgggagacattaaggccgtttacaatgggctcaacttgccagtactatcaccaccagatggcctctttggcatcgtttggccgatcctatatgcgctgattgcgattgctggttacttagttttccagcaggctacgacacaccgtgaccgcctcatggacgccaccctgtttggtatccagctgttactaaactttatttggagcatcatctttttcagccagtcggcttattggtggggcttagtcattatcattgtgcttgatttagtcgtcttactttgcatattacagttctatcgcagtagtcggctagccgcaattttgatggtcccctacttggtctggatctgttttgcaacttatttgacattaggcgtcgcattattaaattaaatataatcgcaaatcaaataacggtcccatcagtcattgttactgatgggaccgttatcttattgtattaaagttttaacgcggcttaactggtgttgtcaccgccagggccccgtgtatcggcactgattaccaatcaactatttaaagcgttctacgttgccgttttcttgaacgatacggcacagcgtaatcttgtggcgcatcttccggactggcactcgtccaatggccactaccctttttagctgggcgggcatcatctttgagacacgtaaaccgtgagccgtgtttatcctggataataaaaattcgactaaattcgttaatggtatcgactaccgtacaatccgtatgcttgatgttgaacacatccgtataaactttactcattattgtccaccccctaggaattagtatttaacattgttaatataccgcgtcttgaatgacaaatccataaatatacatctgctggttattattactaaaaaatgataatcgtacaggtcactgataccccgatataccgcctaattcgtttaaattttcgcccgcaccaatcggccttgataaatgagtaattaatcagatgcagttgcataattgatacctgttttcattgtacaatcctggtctcgtacgatataatcagaatattctttttgtatgattaccgtagtatggtggtgacctttagtcacttaacgaattttgcaattttaaagttcaccaccgagtggcggtcagtctacaagcacgaacaacagggggagtattcaatgaaagtcattaatgtcgcactacacgtcaaacccgagttaaccactcaatatgaagcctttattcatgaactagtggtcaattcttcacaagaacccggcaacggtttctacggccacttcaagcaactggatcataacagtgactacgagattattgagcactggcaagaccaagccgccgttaattttcacaatgaaacgccgcactttcaaaactttctcgcccatatcaacgagtatctgataactgagcctgaaattacccggatggatcactagcgacttggtactgtagtcacatgagcgcaactgacagtcacctattgaatcacaaatttgagccacctttgttcagctaacttgcattgagaggatgctcatgcgcgtaccccttaatgctaaaatgccagctgccaagctgtaatcgcaaatccgattcccggcatccgcttaattattaccactaatttacaatagcaacctgtacttcactaatcagtaaagaccggtcatcgctattcgcttctatgaatccttaaagcacatttaaaaaggtcttactagccaataaacgccagtaagacctttacgatatctcaaagacaacttttatagtctaaaatcacctcaaagtaaatttagacctcatctaattactgtacgtcaatatctgagacttgatagaacgcattaccagtatccgctatattccaaacactgagtaacacttgatagcctttttcattagcagaaatattgacttggtgggttacaaattcactagggatggcaccattgtcattataactagctatcttcttgaaatcactaaacttaagtggtgcgtttggattccagccaggcttggtaatatagtaatcccaagtactagttttatgacgagcagttaactgccaagtcacactaagattgccggccttcacaggtgtcttataccaccgtttggcattttgctcgtccagtggtgcaaagttagcaataccggcactggcaattttgccatcaataaatgtattttggggcgcttcaatactctgtggttcatacataaccgaaccaatattggtattcaaaggcccacctggataccaagtactccccagataagctcttccacccgggttcgtcacaaagccatgtgctgaaacttgaatcacgccacaacctaaaaacgcgatcatcataccaactataataaataagtaccgtaatacatgattctttttggtgctcaacataagatcccctcctcaattgtcactataacgccctgaaaacatgatagccaccaagatgcacagagatccgaaatcttttctatgcttatcgattccagcctaatactgaacaagtctggaatggttgccctccttgtcaatcattccaaatgcataataaaaaatccctcgtgttcttataagggatgtactagtccctgtcaagttgtcatttgaaataatataagttttgattcacttcaaacggccttattccaatattctgctggtgtgaggtcgtttcttgctggtgaacggtctaattgattaaaataggtgataccttcttcgactaaagcggccagctccttataggtggctggtctggcgtgccgcgctatccagcgtaccttaaattcattccaccaacgttccattggtgcgttatcatatggcgttcctggccgtgacatactgcgtgtaacttcatgctgtgccaaaaactgattaaatgcgctcgaagtgtacgctgagccccgatcagtatgcactaagggatggacatcacccgcgaaattaaaggctcattgaaaaacctgaatctccgcatttgaagtttcagtctcacttaacctatgggcaattaaatgccgaccataaagatccagcacgccacttagacgcactttgtattggccattgactccatagaccaattcagtcgaatcggccaaccaggcctgatttggccgactagcgttaaactgttggtctaaaacattgtcttgtaaatactgttcctgttgctggatacgtgaacgtttcttctgacggacctgacaacggttagcgttctggaactcagtaattagagctaacttttcaactgctgaatatctagatcttggcatacgaaaatccctccatgaaatatcagatgaattatatcatttcatctgacaaccataaagggatcataacagatcaatgaaactacatgtttattgtggagctatatttcgatacgactaccgcagaaccgacaagatcaatcataaatataatggcgagtcattggaaggccagttccactcggcgctttcactaatagatattgaataacatcgatatttccggcctcaaaagcagctgcacatgcctgtaaatataattgccacatgcgatcaaatcgttcaccataacttttgacgacctgttgttcgacttgctgataattgtgataccagatttctaacgtcttttggtaatggcgccgcaagggctcaatgtctgaaaattgtaacttagcagccataatatgtttgagattctcagcaacatttgggatatagccccctgggaaaatatattggttaataaatggatcaacgccggcaccttcatgttgacctgtaatgccatgaattaaagctcggcctcctggaactaagaacgcttgaattttattaaagtacaaccctagattttctttaccaacatgttcaaacatacctaccgaggtgacataatcaaattggccagtgacttctcgatagtcctttaactgcacatgcactttttcctccaaatgacgttgcttgatttgcgcttgtgtataatcatattgttcttgacttaaagtaatacccgttgcatctaacccaaactcatccgcggccataaataataatgttccccaaccactcccaacatccaataatcttttaccaggctgggttgccagcttatttaaaatatgtctcactttattgagttgtgcctgttttaaagtatcatcgtcatgttcaaagtacgcacaggagtaggtcatggtaccatctaaccatagtttataaaaatcattgccgatatcataatgactttgaatatcttttgtgctgcttttttcggaatgtgatatttttggtaagtgtttcaaaaatgaattatgtgtcaaaaaactgtctttttggcggtaagcagaggcaattagttcctgaatgctcccatctacttcaatatccccattcatgtatgcttcacctaaaaccaatgttggctgattagttaataacttaattgggatttctttatttaatcgaactttaacagctggtatgccggtaccataccgttcaatttgcccatcccaataagtgacttcaatagtaacatcgaacgctttactaaataagtttttataaatgattttgtctaacataacagtctcctatataatgttttgtgtatgaaacattatatacctgaatttgattttctgaaagattgattgtctttatttcactgaacctgtattgaacagccaacggtatttctaataatagcaatgactgccagttttatttatactgaaaattatgctgttcataatatttatattgataatcttaaactactgatgttaaattcagaatgacctatttttttaaataccaagaactagtgtctgttgccaaacatcgagattgttcagcatcaatatttactgcagtcattacatctaaattgcttaaactaaatggaggtattacaaatggatttcattatcgcaattggcggcctcatcactggcattggcctcatcatcaatgtctttaacacccggatcaagtatggctggttcactcactatcagagcaaaagtcggccacttaattatgttagtttattattaatcataatagggttaattattattattggcaaagcctatctaaacggacaactaaattaacataaaaactaaattgctgatgcagtacagtattcatttgtatgttagcctatatagtggtgacgtgaaatttatatcactataactaattcatttgtttaaactaaacactacactgggggattcaatgatgaaacagcaacagaaattagcgcgtttaacaactgttaatcagcttttagaacagctaaacacttcagttccaattgaaaaagttgaaatcagaaaattaattagccaagcctacgcaactatcaaccaaccagattcagttactaagcgttatcaacaaatacccgacgcaatcaatgaattaatcggtcaacttcaagtgatggctgtcgctaaaaaataccatttctcatctgaacaagatcagttaattgccaacttaacaacttctacaaataaaatgtttgcccacggttggtatggcctaattgccatgagcggtattggaaagtaaacctagcaattcataaagagtgttccagctacgatttgacccattgcaggcatccccaaaagagcatctttttaaaagattagcgggtcatgatgtcaatttttgttactgtttaaacttaactgtagtataaaaggcgctcagcaaatgagcgccttttatgttactgctacaactttgattgttgttatatcaacgttcctacttaacttccgaagtattcacaatcggctgagtaccccgctccgaaataatggtgaccatcatgttattgatcagttgcagtttcttatcgtctgatagctgcatccccgtatctttctctaaacgggcgatcgtgtcttccgtaattgaaacggccccttccacaatgaccttgcgagcagatagaattgccgaagattgttggcgttgtaacatcgcactggcgatttcagtcgcgtatgcgagatgcgttaagcgtgtctcaacgatctcgacccccgcaacatttagccgttcttgaagttcttccgttaaccggtcagaaacttcggttggattactccgcagcgtaatcttcttgtcgtcatcaaacgtatcatatggatattcagaggccacgtgccgcaccgctgattcactttgaatctcaacaaattgttcataatcatccactgcaaagagtgccatactggtatcaacaactttaaacacgataacggccgcaatttccacgggatttccccggaggtcattaacttttaaaatggcactgttaaaattgcggacccgcagtgaaatggaaaacttactggttaacggaacggtcataaacagccctgaatcacgaattgtcccgatatacttaccaaaaaatgttaacacgcgcgcctcgttggggcccacaattgttagcgaactagccccaaaggccgcaataataattagcaatgcgcccaaaaagatactcgcaaaatgatcgccagtcgcaccggcccaaaccagccaaccgccaactaacacaaatgcgatcgctaacactagaccaatatagccattgatatgaaacacttgtttttctttcatcaagactaccccctttggcccttattatagcataagcgtctcacatgctcgcaaagctaagttcgatggcaagttccaaagtcagtaatggcgatcgccttcgcggccctaccggctcaactattcaaacgtgcgtgaagtccatccccatcaacgtgacttaactcggcttgccacttttccgctcccgtcccgcaaaacaccaggtcgtcatcactagcaatagcgtgaatggccaagcgacttggtaggggcgcataaacgcagcagttaactcaattttggctttggccttaatcgctgatgcagcagtccttattcgctggttagtgtgtttaacttgactgtgaaccttttgggccacctgctgatgaatttgagctttgatacgcactggagcggactgcaatgaccgtgcttttaacacttgcatataattggcagcaaccaaccggcgggccttagccgccgtgattggctcgtggaccgtttgcgcggtttgctcagttgctaattggtggtcaaccacgcgtaacgtatcacgtttggcttgcttaggaattgataaagtagtgaccgtcgtcgttgcatacgttcgtatctgtgtcttagccgttgtcaaattagcggctaaagctgacacaaaaatggctacggccaacgatgtgccaatttgccgaaacacgccaatcacactttgtgacgctgtcagtaactcaccggtaaaatcaccggccgctaataccgtaattggcccaataatcgtgccgtagcccgcaccaaccagtaacgccgccaatgcaaactgccagtactgactaggactcatcaggctaagtaccccataacccgtagctattgcgagactaccactaaagatcacgcgccgcgcaccaagctttgctaacaagaaaccactgattggtgaaaaaataaaaatcatcattgaagcgggcgtaatcataatcgccgccatcaattccgtcttactttgaactttcgtgaagaaactcggcatcaagactaatagtcccaccataaagacccctgataacacggtcgctaacgccgcaccgttaaactgtcggtctttaaatagggctaatgggaccatcggcgctgagacgtgggcctccatccagacaaaggcaatcaatgttagcgcactagtgacgcccaggctcaggactacgcgactcgtccatccccagtcattacctttaaccaggaccaacgtcaatgccaataaggtcgtcatcactaaggcactcccaccgaggtctagttttacttgaccatgactagggtgccgccatgatagccaggcgatgcaaccacacaacgcgacggcaactaaaggcacgttaatcaggaaaattccccgccacccccaaaattgagtgaccgcaccaccaatggttggtcctaacgctgcggctagcccttgcatcacgcccaagcttgcaatgacccccgtatgcctgctgagtgcaacactctgaataccaatcgtcatactagccgggaagacgatggccgcaccaatactttgaatcgctcggccagtaatcagcagcccgacactgagactcaatccagaagttagtgaaccaataccaaagagcccgagtccaatcaagtacatccgcccacgtccccagacatccgctaaccgaccgagtggaatcgccagactagcaaacaggacggtgtaaatattcagtgcccacgacaggtgcgtcaaatcagtatttagtcccgtctgaattgctggcaacgcaatattcataaccgtcgtatcaagcatacatagaaaaatgccaatcatcatcattgcaattactttcgtcgattttttcatcataatcgcctcccgttaagttaatgggagtatatctggtaaaatggtcataaataaatacttacgttacaaaaaaggagatattgtaaccaatgaacccacaaacacgaaaacgccaaaatttaactgcggtttatgcggccttactacagcttatgtcgcaaaaaccactcagtcgtatttcaatcacagaactttgtcagcacgctcaggtttctcgcacctatttttaccgtaatttcaccaacttcgatcagattattttggcctatcaaaaacagactatccttcaatatctgcgccaattaccgcgacaatcaaaggttaaattgcaggtattgatgactcaatatttcactctcatgcaacaaatggcagcgacaaatgcgttattgatcaaaaatgaaaaaacccagatttttattcaaagtttcgaagccgtctttgcattactcatcaaacaagaccgtattatcggttcaagcaataccgcgcttcgccaaccgtactacacggcttatttttctggtgcggtcatcaatatgctcgttcattggcaacagaatgggatggttgaaacaccggcctatctcgctcaacaggtcactcggttcactctacgcgataacgaaagtaggtcctaaataaaacggggtgccgttgccgacatcccgtttagtagcttctttaatttacttatcaactcagtcgcgatggtaacgttgtttaacacgcttcatcgcttgtttgccaccgaacatccgctgaattttagcctgctccaactggcgtgaattgagtccttgatagctcatttcacgttgtaatttttgatagctttgtaaccgttcagacgttaccgtgcccacctcaactgctgcccgtaccgcacaaccaggctcgctagtatgggtacaatcactaaacttacactgtgtcgccaatgaggcaatttccgcgaaagtttgatttaaatcacccatgaagatttgtaactcacgcattcctggtgtatcaatgacacaggcgcccgttggtagcggtattaattgccgactcgtcgttgtgtgccgccctttgtcatcatctgtacgaatcgatttcgtcgccaagatatcctggcccaacaatcggttaatcaaagtcgacttaccgacacccgaagagcccacgaaggccaccgtttgaccagtcgttaggtatggttgcaattcatccaaaccctgacccgtttcgaccgaacaagtgatcgtcggtacgccgacactgacatccgccacagcccgtaacttagtggctagatccgtacagagatccgccttggttaagacaatgaccggaagtgcaccgctatcccacgcaatcgtcaggtaacgttctaaccgccgcacattaaaatccgcgttcaatgacatgcagataaagatggtattaatatttgtcgcaatgatttggccgtcttggcggttcacggcaccgcgcgccaagacactctgccgtggcgcgattgcttcaatctgcgcctgattatcagcggatgaagataggcacacccaatccccaaccgccggaaatgccgcgggactggccgcttcataagccagttttcccgtaacttgtgctgaacgttccccagccgtcgtgatgacttggtaccaatcacgatgttggccgataatccggccaagtatttgaccgttttccttagtcaagtcggcttgaaccgccgtcgtcaatccatatttaattaaattaattgtcaatttttataatcctttcgcaaagtgacttaccctaacgctctgcgaattaaaaatgcgcccagtcttatcccaactgtgcgcaaaaaccgtccgacatgtctatctgccaggctattcgtcacattagggtacacgaaactaagcgggtccaacccacttttttcgctcaacaacaccctaacgaatgcccgacataaaacacccctcctatatttgataattacaatttaacaagtctcaccaaaattgtcaatttaaagcgattcaccacggcaattcaacgctaatgtgcgcattaaagtcttgctggcgctttagtttggctaaccgggcggcctgccgctcttgatagccctgagcaacaaacgtgtattctggtttatcagcgactaacagtggtaattcaatattacggtccgtcaccacgaacgttgaaaagcaggtcaatcccaaaaaccgttcgccggtcttcaagtgttcaccaatgattttagtaaatacctcgatggagcggtgaccaacgcccgaaacgtaagattccgcacacattgagtcttgtaaccgaaacggcaataaaaaattgacctgatcgactgacacggtcaccgtctcaattcgagccactcgcgatgcggcaatcgatgaattatcatcgatagtcgccaagatttttccgccgaaaaccgtgtcgtgctcattcaaatcagctgaaaacacacggtgattgctaattgataaagtctgtgaaatatgaattggttccatgtctgcaccccgtcatctttaattattttatttatatcactgcaaacgacctacaatgtgattaaaacagactagctagctcgattgttgttcggacacgtccttcctgctacgaccaccgaaaccgactgcttttatccttatgtcatcgtcggctttgattccgattcaagacacatcgttagaatgtgatcagccgccacaattaatctgaaagcgattggctatacttcgtcgcaaacgcccaaaatttagcaaccacggcagcgtgattatctggacgcttcatgaaagccatctgactgcgaatagtaggcgtcagtggaatggctttaatgttgtcaaaaccagtgagatcaaatgaccgcgccatgacaaccgagacaccatcaccctgattcagcatttctaaaatgagatcaattcgttgaccatcataaaccatctgtggcgtatgcattttttgaaatgccgaaaacaacgggttatcttcaccgatggtatctttcaataataaaattgattcatgtgccagcatcgacagactaatctcagcttgttgcgccaacggatcgtctttcggaacaaggaccacaaactgatcggtctcattcaataaaacgtcataattattgggttgatccccgaaaatccgtgtaaatacaatgtcgacattcgtatgatccagtgcatgcgctaaccgatcgacactcgcctcactaaattgtaatttcacttccggataccgcttcgtaaatgccgtgataatatgaaaagcctggtattgtgctaaagatggtagtccctgaacaaccagcgactgcgcattatgagcggtattagcggccagaacttgttatagctgacgctcttcgcgcagaattgcttgggcccgtggcaataattgttgcccaacccgtgttaacgtgacttgccgatgcgcacgttcaaataattggacctgccaatcgcgctctaaagccataatgtattttgaaatggtcgactgtgacaaaaacatgcgttcagcactgcgactatagttctgggtcgtggcaaggtcaacaaacactgccaatttccgtgtttccataattaaccctcttctaactattcctatttagaatagtttaccacatattcagaattgttcttatccgaaacaagctctaaactaatagctgttgtttttatcaattaaatattgaggagggcttgcgtgccaattggaattattactaacgtgtgtgcgatctttttcgggggtattgtgggcgcattgaccggcaaacgaatgtcacaacgtttaaaagatgggctgaatatgtcctttgggatctgttccatgtgtatggggatttacgcgattgcaccattaaaaaatctagcggcggtcatctttgccgttattatcggaacaggtattggattgctttgccatttgggaactgcaatcaatcacggcgctgccgcgatgcaacgtttcatttcacggtttgtcaaagcaccagcaacttttgagaaacaggcctttgaacagacaatggtcacggtaatcgtattattttgtgccagtggaactggtatttatgggactttaactgaagggatgaacggcgacgccacaattttgatttccaaatcaattctggacttctttgctgcggtaattttcggtgctagcttagggttagttgtttccttaattgctgttccccaactaatcatcctgactgctttattcttagtcgctcacctagtctttcccttgaccactcctgacatgattctagatttcaaagcggtcggtggtattttaatggttgccagcggctttcgcattattgccgtcaagatgtttccgaccgccgatatgattccgatgatggtcgttatcatgccgatttcatggttatggatgaattttgcattgccattattatagataaattattgaaggataaattaaaaagcagttctgagcccacaattatggcttgctcagaactgcttttagtcagcacgtagaaggcttgcactagcaggtcaaccagttggccgataataaaatccagtggccattgttcactaaacttaaaaaagagcgtactaaagttaataccaaccatgcgctccaatcagccaaccgacaagggacgagccaaaaatccctcgtgggtcgcaggcaattctaacggcgtcaactggtataactgtgtttgatagcacgctagtccacgttgtaaatcaagaacctcgacacggcggggcgcatgggtcaagccgcagcccactaactttaataccgcttctttagccgtccaaagttgccaccctaaccgataacgatcttgcaccgataaagcctgtaatagctgccattccgccgatgtaaaggctcgccgaatggcagttacatcatatggacggacctgttcaacatcgatccccaaaggtcccggaccgaccgccaccatcactaactggtgcgtgtgactaacactaacacctaatcgaggatgacttggaaaatacggctggcccaatcgatgataagctaatggtaccgataacacttgctgaattaattggcgactcacggttcgctgagtgacccgccgcatttttttagaaacatcgaccggcatctgaagccactgccgtttaaagacaacttgagtgattggcattaacttaagtggacccctttatccacgtataccacgtccccggtcattccagtcgatagattgcttaataaaaaggcagccacgttgccgatctcacgcgtttttaccggttctccatcaactgtcatactgcgagataattttaataattgctgatgctcatgaatacccgttaccgccaacgttttgactgctccggctgaaattgcattcacgcggacttgttgtggtccaaggtcacgtgccaagtaacgcacatttgcttccaacgcggccttagcaacccccatcatattataatttggtacggctcgctctgatccaaaatacgtcaacgttacgagactggctcctggtttcagcattggccgagctgctcgggcaactgcaatcagcgaatacgcactaatattttgtgccaaatcatatccagctttcgtggtattcacaaaatcaccttctaaggttgctttatccgcataagcaatagcatggataatcccatcgatggcaccatactgttgtttaatgcttgcaaatgcccgctcaacattgtcatcatcagcaacatcacaggcaattaacggcacatctggcgcaacaaaccgttgtaagctttgcttcaaacggtcattttggtaagtcaagataacctgggccccctgtgcaattaatgcctcggtacacccccaggcaatactgcgctgattggccacacccatgaccacaatggtcttacccgataaaattccatccatacttatcattcctcacttatttaaaattgccgataacgggcttggcgttgcgtaaccagttccgccaccgactttgctgttaaagcagttaacgtctcgtcaatggctgttttcagcggttgacaatctgctgcggttgctacttcaggaataatccgatcgataatcccatctgccaataattctgtcggcgtcaagcgcattttttccgcagcttcagcagcacgttgcgattctttccataaaatagtggcatagccttcaggtgataacaccgagtaagtactattcgccaacatccagacttgatcaccacatgctaaggctaatgcaccaccactgccaccttcaccaacaatcaaactcaaaaatggtactcgcaattgtaatcctgctaacaaacagtcagcaattgctcgtccttgtccctcatattccgcatcaacacccggataggcacccggcgtgttgattaaggtcacgaccggctgccgtaattgttctgcttgccgcattaaccgcaatgcttttcgataaccgctaggcgtcgcacagccaaaatgccgagcttgattctcggccaaattttgacccttctgaataccaataatggtgacgggccgttgagcaattgttgctaagccggcgattacagctggatcatccgcccgttgacgatcaccatgacaatcaaaaaaatcctctgtcaagccatcaatcaacgtttgaatgctaatcttactagcatcacgggctgcttgaacttgttcataggccgttactttagacatcctgatgacctccctgagtgattgttaataatcgttgtagtgttttccgtaaggctggtcggggtacaatttgatctaaccatccattggctaataaggtttccgcccgttgaaaatccgcaggtggtgtctgttgaatggtttgttcaatgactcgccgacccgcgaatccaatgagcgctcgtggctcgctcaacataatgtcaccctgcatcgcaaaactagccgtgacaccaccagtggttggatcagttaaaattgtaatatacaacagtccagcttttcggtgatttgcaaccgccgtggacaccttagccatttgcatcaatgcacgagcgccttcttgcatacgcgccccgccagaagcagtaaccatcacaacgggaagtttttgggtcgtacaagtttcaaataatcgcgtaattttctcaccggttgccgcccccaaactccccatcataaatttagtttccatgacacctaagccaaattgataagtcgctaacgtcccaataccagtcaatacgctctcattcaagtgtgaggctgctttggcacgctgcaacttttctaaatatgcagggtcatcaaaactgacgggcgcacttaggtccgcatcccgctcttcaaaactcgccgtcaattgttgaacacgttgccaagcaggcaagcgaaacccataatcacaatggggacataccttgaattcaccgagatcttgggtataacaatcttcatgacaaactggacagcgcgtcaataacgcgtctgggatattatcccgtcgaacagctaactgccgttcagtgggtgcttgaaacttgcgcttgggcatcacttaaccatcctttcaaaaagtcttgttcgatataagctgtggtataggtaccacggctaacagtcgaatctgcaactaatcctgctaagaaggtccggttcgtttgaaccccatcgatggtcaattccaataaacaacgatgcatcttgcgactgaccatcttccgattaataccgtgaacaatgatttttgcaatcatcgagtcgtaaaacggtgcaatcatgctaccagtcaccacaccagcatcaatccggactcccagtgtccccattgggtagatcaaccgggtgatttttccaggttgcggtcgaaaatcgtggtacggatcctccgcattcaagcgacactccatggcaacaccatgaattttcacatccgcctgtttaatttttaatggtataccagctgcaatttgtacttgcgctttaatcaattcaatacccgttaccatttcagtaaccgtatgttcaacttgcaaccgcgtattcatttccaaaaaataaaaatgatgctgctgatccattaaaaactcataggtacccgtatttgtataacccaactttttggttgcgttagccactaattgtcccaatttggtccgttcagcagtcgtgatgaccgcacatggactttcctctaacactttttgatgattccgttgtagcgaacaatcgcgctctggtagataaataacatgcccctgttgatcggctaagacctgcacttcgatatgcttcgccggggcaatgattttttctaagtacaaccgatgatcatcgtatgaagcttgagcttcctgctgagctgttcgaaaggccttcgctaaatcttgatcattgctaacagcgcgaatccctttaccgccacccccagcagcggctttgatcataactgggtaacctaaggtatgggcagcttgcatagccgcctcaacatccttaagcaccgatggactgccgggaatcacgggtacgcctaatcgttgcatggtctgccgggcattttctttgtcacccatctggtcaatcacctcaggacgcggtccaataaacgttaactgacaatccgcacacatttttgcaaattccgcattctcagataaaaagccgtagcctggatgaatcgcctgacacccggtcaaattagcagcgctaataattgcttgcatattcaaatatgactggttgacgggactcgccccaatacagaccgcctcatcagccagatgtacaaataagctctcctgatcagccactgaatagacagcgaccgctttaatccccatctcatgaagcgcgcgaataacttggaccgcaatttcaccacggttcgcgactaagacttttttaaacaatcgccatacctccttcaggcttgcattacaaaggttaaatcagcactaacaacctcacgaccagcacaggtaatcacgccatggcctgttccgatttgacgacgcaacttagttaacgttaccatcgcttctaaccggtcacctgggcgcacatccgtcttaaaatcagcctgccgaattccgccaaaaaagacgttattaccatgatgctccggcatcgatagtaaagccacaactcccgtttgagccaaaatttctaataatactggccgaatcatcgttcttccggtcagtgtcggactctgaaaaaaccattcattaatcgtgactaatttttccgctgttgcgctgacacctggttggaccgctatgatacggtctaataattgcagcggaaaccgttggggaattaaatccgtaacttccattaaacggtcgtctcctcaattgcaaacaatggttcatcaaattcaaccatagttgcattcttaattaaaacttctttaacgatcccactaactgggctagggacttcgttgatcattttcatcgcttcgattacacacaaggtttcccctgacttgacacgatcacccacctgaacaaacggcgcctgtttcgggtcggcagctaagtaagccaccccaactaggggcgccgtgaccatcgttgttcccgattgagtcgccacttcagtcgtcggtttgaccactggtaccgtagagtcggtcactgccggctgtgaacgcgctgaatttgtctcagcagtttcagcttgtttattcaaatgcagttcaaaggttgtcgtcttgacgtccatgacttgagcgctggattgattaaactgattgatcagggcggtcatcgcttccgtatccgtcatactcatacattcacccacttcttaaaggcaaccacggcattatggcccccaaaaccaaatgaattactcaaagcataggttgcggcttgatgttgagttgctggcgttactaaattgactggacactcaggatcttggtccgtacaaccaatattcgcaggtaactgacccgcttgcagagcaccaatcgttgcaacagcttcaattgcacccgcagcgcctaataagtgccccgtcattcctttagtactgctgacttgtatatcttgaccaaacaacgcgctaattgcttgagcttcggcactatcattcgcatgtgtggctgttccatgagcattgatgtaatccacatcacgcggctgaatgccggcttccgcaacggcttgttgcattgcacgtttggcaccagcaccatccggtcggggggctgtcatatgataagcatcgctagtcgttccgtaacccacgacttcaccaagaatctgggcgcctcgggcttgggcatgggccaacgtttctaagactaacgtcgcacccccttcacccatcacaaacccattgcgttgacgatcaaacggtaatgaagccaacgttgggtcagtggctttcgacaacgcagtcagggacgcaaaccctgcaataccgatttcgttgacggaagcttctgaaccacccgtgatgatcacatctgcctttccttgacgcaaatattcaaacgcatcgccgatggcattcgtcgccgacgcacacgcggtcacaatcgcttgactggtattctgtgcgttaaattgcatcgcgatattaccaacaaccatgttgatgattgaattagggacgaataacggtgaaactcgtttgggactcttgtcgtgcatcttgatcacttgcgcttcaatcgtcgttaaaccaccgatacccgaaccataaataacgcctaatcgttctggatcaatatttgcttcatttagtccggcttgcgccatcgcttcacttgcactgtatagaccataaacggaaaataaatccaatcttttcgctaatttcttttcaattcgttcttctggctgaaaatccttaacctcaccggcaactgtaatcccagtgggcgtcgcgtcaaacttcgtgatgggcttaatcccaacttgtcccgcgaataaccccgttaaaaattcatcaacactattaccgaggggcgtcaccgcacccattccagtcacaactactcgttctgtcattggataacctcccatatcttatatcgtcatgccaccgtcaactgttagcacttgtcccgttaagtacggttggtgcaataaaaagtcaattgcttgggcaatttcgtcgggcgtcccaaagcgtttgagtggaatatcacttaaggcagccgccgttacacggtcattcaattgtgccgtcatggccgtcgtaatcattcctggggccaccgcattacaccgcacttggcgccgagccccttcctttgccgtcgttttagttaaaccaataattccagccttactagccgcatagttcgcctggccgatattgccatgtaacccgaccacactagcaacattaacgatggcgccttgtcgctgtcgctgcatgacttttaaagcgtatttggtcatattaaatgtgcccaataaatttgtttgaatcacactcatgaaatcttccgcgtgtagccgcgttaataactgatcatgggtcacaccagcgttattcacgagtccatctaagcgaccaaaatttgtcatcacggtctcaattaaatcagccgccgtttgatcatcgctcacatcaccaactaattgcgtcaaccttggatattcagccgttaatgcttgccaatcggccgcttcaatttcatgatgaacgtttaaaataacgctggccccctgagctgccaaccgtttgactgttgccaaaccaatacccttagcagctccagtgactaaaatcacttcatccacgctcacgtacctcctcagtatcctgacaataattctgccaatctgtcatatcttcaattgaccaaacccttacccccggcaatgtttgtttggtaaaagttgctaaactatgccccggtccaacttgaataatctcatcgacctcatatgtcgcaattcgttgtaagcaggccgcaaagtgcgttggcgatactaactgttttaccaacgtttccttgacagttgcctggctaaagggggtcacggtcgtattactgatgaccggaatttggggtgctgcaatattaacaaatcgtaatcgttgcgccaacgcctcactcgctgctgccattaacggcgtgtgtgaagccaccgcaacgtctaatgggaccacccgtttaacgccgtgtgtttttaaataggttcgcgcagcttgaataccagctgcatcgccaccaataacaatttgatcagctagattgtaattagcgggatacgcaacccccactgcttgggcactttgacaagcggctgcaaccagtgccggcgttaccttcaacgccgcgaccatctccccgggatgctgtaatcccgctcgttgcatatatctagcccgatcggcaactaacttcaagccatcagcaaatggcaggacgccagctgcaatcaatgcggcatactcgccaaggctcaatcctgttaacacggttggacactcattaagcaacgctgttaaagcacgatataaccccatattcatcgctgtaattgcaaccggcatccgttgagcatcatcgatccaatcagcagttacccgcagatcccagtccaacacttgattagcttcgtcaatcgtggcttggtacgctggtaacgtttgataaagatcggcccccatatcggcaaactgttgtccttgaccactgaataagattgccgttttcataacttagtcctcgctattttcctgatgagtcgccacataatcaactaaatcaccaaccgtggctaaagcgtcatccgtttcgatttcgatatcatattcgtcttcgatcttatcgatcacttcaaaaacgtccagactatcaagtgctaagtcttcggtaaagttcgttgtcatcgtaatcttgtcagcatccacgtctaattgttccacgatcatctttttaatttggtcaaaaatttcagttttagtcattgttgattcctccagaatttttaaattaattttaaatgcttgatttcagttatcaattaatactcaattacgacactaccgacggataacccgccgccaaaaccggtaaacaccagcttgtcaccacgttgaacttgcttttgggcaaccatttcggcaaatagaatcggttcactggctgccgcagtattgccatactgtgcaatgttcatcggtaattgttccgtagctaagtttaatttttgaccaacgctcttaacaatacgtgcgttggcctgatgaagcacaaatgctttaatatcactcgactcgagccgtgcctgcatcaacgcctgctcaattgagtgcggcacttgcttagtggcaaagtcataaacccgccgaccattcatctgaaaggcccagcggttagaatctgcaccatcagtccgtgtcgaccacggattcacctgaggttgctgtcccgccgttaaataatgcccgtcagcgccaaacgtcgcgtaatgaccgcccagccagtgcccagtggccgtattaggcttagcagtaatcaatagaccacccgcaccatcaccaaataaaacggcagtgctacgatcatgccagtctactaaccgactcaaggtctcgctaccgattaacaaagcggtctggcccggttgtaagtattggtgaaccaactgcatcccataaacaaagcccgcacaggcaacattgatgtcaaaggcaattgctttttcagccccaattgctgcctgtacttgaggagccgtcgccggtgtcaaataatccggtgacatggttgccacgatgatcaaatcaatcgccgtcgccgctagccgactttgctgcaacaactgctgggcaactgaaacagctaaactcgtcgttgtctcatcggtcgcgacgtggcgagaacgaattcccgttcgctgcttgatccaatcatcagaagtcgccatcagttgcgttagttcttgattcgtgactttggtcgtcggcagtgccttagcactcgctaaaatcgaaaaattagttgtcatggttggttacaattcggcaatgcttttaaaaaactttcccaaacgacaatcgccgaattgccattaccacctttctattttgaatcagttgcaccaacgataaaggttaaatcagttgtgcaggctgccttgtcaccgaccatcgcctgacaactcaccgttcccatgttggaccgttgcttgaccatttggacatgcaacttcaagacatcaccgggacggacaattttgcggaacttggcatccttaatggcgccaagataagccgtcttaccagcaaacttttcagatttcaaaatcagaatcgacgcggcttgcgccaaagcttcaataatcaacacgcccggcatgaccgggttaccgggaaagtgcccttggaaaaatgactcattgatcgtgacatttttcgtcaccacgatcgattcacccggatttaattcatccacccggtccatgaataaaattgggtaccggttggggattaattgcataatttcacttgcttctaacacactcatagttagtcgctcctttcacggcgtttgggaatggcattaagttaatcgtccggccaaatcttgtcaattgatttcagcagattaatttacagtatgttacattttttagtagccaaatcccggtaagctgggctctaatcgagctttatttttttgcgaaaatttcttgacgatccattttttgcggtcataatccgtcaacgaactggcacagtttagcaatttgactataaagtttataatcaaattgctaacaagttttgacttcagcaagcagtgatacaatctgttcaactgtcactagcttaaatgcacgcaaaaaaaaattgcatctaagaactagcattcttaaacacaattgttatgacgatctattaatttaaaggattacccatcagtctaaagccatcacatccataagattttaacgcccataacttttaacctaaacggcaatgcctgttaatttttgaacatccccagagattgttggcggtaaacggatggactctgatgaaaccattttttaaaagctctcgaaaaagactctgggtctgaataccctaacaaatagctgatttcaatcaagtttagcgattgatctttcatcaagggtaccactagggttcgacgcgcaatttggacttcatcattaaatgtggtgcttaaagtactaagatgacgctgcaaggttcgtttactgagattcaaacttgttgcaatctcgtcaattgagaaggaaccactaggaattttcttcaacaatagtgcttgaacagtcgcgagcaatgattggttgtgttcaatagccagtttttgttggtctaaccctggttgcaaaaatgcccacattgaattattggccgaaataaacgcccgctgtaagtccgtgacttgaaactgaatgcaattatcagccaattgttgaggtcgaatgcccatcacggcatcaatctgatcaccatacggatacttactaccaactgaaattggcttgatgagttttcccgtacctactcgtaacaagctgattaacaacaattgttccgtcataatcgtgaaacgcggcaactcgacgccaagactatttcccaaaatatgaatattgacaatatctggcttggtcactatctctaaatgaaccggacctgccaatgatttatagtttgccatgcgtgcaatcgcttgttcaccatttttagcagctaatgctgcaaaaaaggacggcataaacgtattaatattagtaatattccctaaactaagaatcatttcatccgtcaattggttgtcgaattcgttcattaactgccaatactccacatcagaaagcattaattgttcttgccaaaccactttattaataccggcagcttcaagcaggctatttaaatcaacgccaaggcttgccataaaacactgaaactgttcagaaaccataatcttcacactaatcactcctactaactggcatgcatcatgataaaatcaaaaacacgagtcggtaaaatcgccttagcaagtaccagcggtttagccccaaatccaattaaataacgcacccgtggtcgtttctgattgaccgccttcgaaatagctttagaaataatttttggatcagacatcattcgcgacgagtattgtcggcgcatacccgcggcagccttggtcgcttgtgtttgatatgcactgtgacgtgctgaggcttctaaatgatccgcagcaatgaatccccagttggttttaatcccaccaggttcaataattgcaactttaatgccaaagtctttagtctccattcgtaatgcgtcactaaacgcttcgacagcgtacttggttgcgtgataccatgcgcccatataactcaccaaccgtccacccatggaagaggtattgataatgcgtccttcacgttgcgcgcgcatatacggtaaaactaattgtgtcagccgagccatcccaaataaattaacctcgaactgttgcctggcttcatcaatggaaacatcctccacagcgccatatgagccataccccgcattgttgatcaaaacatcaatgcgtccttcactggcaattaaagttgctacggcctgactaagcgactgctcattggttatatctagtgacaagggcttaacgccgtatggggctagtgcttcaagtttattcaaccgccgcgccgcaccgtaaacaacgtgaccttgctgtgctaagtctttcgctgtctgaaacccaataccgctgcttgcacccgtaattaaaataactgccatctcaatgacctcctatgtttttcaataacaatagtttacatagaaaatcgcaacggcttaatgatttatcacgtcatcatcataacataacatgccattttttggcgcaggccattaacagctgatattaatcaactcagacaactgcaaaatcgcactcattacgcctggcgctgttgatcaagccctgatggtctaagtattttaaaataactacaccaccaaaaattcgcttgaaattaatttcaggcgaattcataaacatcctgctgccaatttctcatcctaatcaccatccgccaatgcccccgctaactagccggcactgcacttccgattgcaatataacccacaacaggacgctgaaacccaccatgacacctaaacactgcccttcaaagcctgttagcgtcggcagttgcaagagtccgagcttgcgccgtttttgacgggctaacttaatcatgacttcacccgttaccacaactaatagtggtaacatcactagccaccagcggctgccgaatgaatcagccaagccggcactattaaaatgtgtgacaactgtttgcggtgccaaaccaatcataatgacacatatcaaaacggcaccagccacaattgttcgcacgatccaagtaaagactcgcattacgctcacctcatttttgacccagtatagcaagctggcgacagcacggacagcaaaatgcgttcttttaaacggttaattatcgaagccaactacaatcgtgcgaccagctagctttaatgacacggttcaactggttgcatgtcttttttctaataccaacgcaaagactagtctagatcaactaagcttgattgatttttaccattaaattatcgccatcgaaaaagtcgtttcagcacgatgaatcagtactgaaacgacttttaatcgattgcttttaagcgactagttacctagtcgagattaatcaatggtaatcatagccttaattgtctttcgattttgcatgtcttgataagcccgattaatgtcggctaatggatacgtttgcgtaaatacccggcccggattaatattaccgtccaaaactgctttgagtaagaactgtttgtcataagtcgtaacggaggcggaaccaccagcaaccgcaatattttgagcaaaggttgacccaagtggccggttattataatgtggtacacccacatagcctacgcgacccccattatgcaaaacacctaaagcttggtcaatggccgcttcagtgccgacacattccaacgccgcatccgcgccgccaccaaggatttcgcgtacctttgcaatgccttcgtcaccacgttcagcaacaaccgcggtcgcgccagaagcaagtgccatttgctgccgatcttcgtggcgactcatcaagacgatttgcgcggcaccccgcaacttagctgcaatcacagcacattgcccaacggcaccgtcaccaataaccacgactttatcgcccctttgaacgtttgcacaccgtgccgcatgataaccagtcggcatcacgtctgccagcgtcaacaatgacttgagcatcccttccgtatagtcactaggttgaccaggaatcttaactaacgcccaattaccataagtgaagcgaatgtattctgcttgaaagccattagaccaatttgtgtggtccggatgccgatcacaagtaccatcgaaaccagccaaacaagccgtgcactcaccacagccatgggtaaatggggtgatgacaaagtcgcctggcttgaccgtcgtaatggccgagccaattgcctcaacgattccgatagcttcatgtccttcgttgatcgaatgggcagccttgtcatcaccatgcgcatatgaccacaaatcggaaccacaaacacaagtccgcacgatgcgcacaatgacatcatcatcagattgtaatgttggtttgtcaacttcctgaacagatactagtccagctttttcgaaaattgttgatttcatcctaatcacctttggccgcctcaaccaaaattcaatcagcggtcgttcccttcatcattaaaataataatattaaaactaatacacatatattataacaataatctgcacgtatcagttaatgattgcaccaagtcgggtatcaacaaatactttagttactcagataattgtgaccagactcgcttgttacttatcattcagaagctttccataaaaaatgcgcccaaccatgttagtttcctagcaaggtcgggcgtcttccctttgtcgattgaccactttcaattcaagctcgaacccactttaatagtgccgtagctgccaattcatggaagcgagcgccataggttaggcctgcgtcatcacagcggtaatttgattgatgtaaggtcccattgccgcctgaacctaagaatccatagaatcctggaatacattcttgatataacgcaaaatcatcgtcggcattgcatagctgggcaggcacaatatcaaaatcatctttcagaacacgtgatagtacagcggtaagtgccgcgttattgttgacacagcttggtcctcggtcccaatcaattgtagcggtttgctgattcatcttggcagttgcacgcacaatatcgtaaaaacgtactttagctagatcccggttagccgtgttgaaggtccgaatcgtgcctcgtaaattcgccgtatttggaatcacgttaaaagtcgttcccgcttggacggcagcaatcgttagcaccagtgctgcgtctggcgcaatatttcggctacgaatggtctgtaaattactgatcaattcaccaagcgtcacgatgggatcatgacttgcttcggacatcgctgcatgggcgccctggcccaaaattgtgacgtcaaaattatcattactagccatgagtggtccagacttcatcgctaaagtgccgactggtaaattcggcatattatggaatcccgcaatcgcacgaacacctgctagaacaccattatcaatcatcattttggcaccgcggtgtccttcctccgcaggctgaaagatcagtcgcaccgtaccattgagatctgcctcatgcactttcaataatcgcgctccccctaataaggcggccgtgtgaaaatcatgcccacaagcgtgcatccgaccaggaatcgttgatctaaaggataactcattgtcttcttggattgggagtgcatcaatatccgcgcgcaacgcgatgattggcgcaccatgcccaatctcggccaccaccccagtttctcccggatagtctaccaaccgaatgttcaactcagtcaatgtttgcttaattaaagcggtcgtcgcgacttcctgcagtgctaactctgggtgtgcgtgtaattgatggcgcaaggttgtcatccaagctgctaaagttgttgtcatcatctgaaaagccccctataaaattttcaagaagattgacgcaataatcactgacgccactgagacggttgcaaaaccgcccactaacattttaggtaacatctggtctagtaaatattgcttttcctccgcagtcgatcccataatttcggtcacttcatgggtgacgatatagtccgcggggaaaccaaataaggcagtcaatgcacttgcaaaagccatttcgcggctaaatcccaacggtcacgccaataagctagatgcaatccacatccctaaaacaccaagaacgatcaacgttacaatcgggatcaaaataccacttaacatgctgattttaacaatgtttagattggcaaaaatataagctagcaaaccatacatcagccagtgaaagacgcccgctttctccaacaccgcatcttctaaaaagcccaactgatgcgcgataacaccaaacactaaacaaatgatgtactgattaatcgtgccatgggctaactgggcagtccattcagctagcccagtcacagcagcgactttaaataacataaaagctgaagtatcataagcagccggtagttgccaatgccgtaattgaggttgaactgatttcaccttcgctggtacggttggtagcgggcccactggtaattgcgccgttgtttgaactgtcgcactggtggcagaatcagcggtcgcgaccgtgacgtctacatgtcggacttgcaatagtcggcgactctcccgttttagcatccacgcggttagcggataaccgagcatgctgtgcatgacaaacattgccaccggaaacgccacaagtgcggtaatatgttgggccttgagtccagctgtcatcagaaaggcagccactaacccacccgtcaacgggggcacactggcaacgatcgtgtgccaatcaaataaaagacggccaattcccatcgtgagcaccactgtcccaaccacgccactcagggcaatcacaactgcgcgccactgttttaacaacaatttcagatacatcaacgtccccatatgaaccaataaaacggcttgggtaatttgaataaaggcagtgccaaatgaagcagcagggacaatgtttttgggaacaattgtccaaaaacccactagaaataagagtgccgtaataaatacggatggaacataggcccgactgcgcgtggaaacccactcgccaagcatcataaaacccatgacaaccattagagaaagaattgctaccattaccatcacttccattagcttaatttacgatcggctttttctaatcgtattatcataatctaacagaaagccaatcgtaaaacgagccgttcaatcagatttcgtttaaatctaatctcattcgcaacgacacaaacgattctaaagtatcgcacctagttccgataagattccaaatactagattgactgaactaactaagcaaatttcaatcaaaatttaaatccatgggacaatggactgggcgttcataaataaattgacgccccaatcgaccatctatgcggcgatgcgtatcagtgaaaccatgggtcaggtataaatgttgcgccacatgattggcatgattgaccgctaataatattgtttgaatcatcggataatgactggcaagataacgtggtaattcggcaagcgcgtcagacgcaacccgctgatgcttaaagcgatcatcaacagataaagctcgcaacaaaatcgtattcacttccgtttcaccgtaactgagcggtccttgaccaacatgcaaacagaaaaagcccactaattggttgccattcataatcataacggccgttcgttctaaatcagatttgcaagcacgaataacttgttgtggcgtcgccgtgtacatcacattaaccagttgatactgttgtatttgcttcagtgctccccgtgtcgtcgaataacgtactaattgaatcatgaccatcacacttccatttgaccgatttagcacttagtgtaacagtccgtggtcatgactgggaattttaataattcaattgttgaattgactaactggcgctcgattcagcctgcactactaatccaccacaaaaacggcatcggaaaaactgcccgatgccgtttggtgatattcgattaaaccagttaatttcaaatacgattcaagtacttcatgggcgcaataaaatcttgccagcaacttgcccggtctcaagggcccggtgcgcagcggctccttctgctaatgaatagactgtcgctggtcgtatcgtcacgcgatgcgtgagcacatcatcaaacaattgattggcacggcactgacgagcagccgcgctgtccaaataatcccataaatcaccagtcatcaaactcttggattcggacattagcttgactggatcaattactggtggattgccagctgccatgccataaaaaatgacccgcccacggtgcttggtagtcgccagactaactggtagtgtcttaccgaccccatcaaacaccgtatcaaaaaaattatgatgggtcgtgtcccaaggatcatggcgcataaaaacggtggttgcgccagcttgataggccaattcagctttcgccggtgttgacgccacaccataaacagccacctcattggccacgagcagttgcgttaatagctgcccaacaccaccgctgatgccatgaatcaagactcgatcgtgcggttggctttgtgctaagtcatggactaagaactccgcagtcatgccctgcaatccaatgctagcgacctgctgatcattgattgcccgtggtactttaatcgcctgatcagctggaaccgcgacaaggctagcgttggcaaacggcacgtcaacgaataacacccgatcaccgcgtttaaaattcgccacttgcttaccaactgccacaaccgttcccacgccttcataaccatcaatgtacggttgatgcttttccaaatgataggtaccacgacgacgataaatgtcggcaaagttgagcccgatatacgttgttttaaccaatacagtatttgcagtaacgattgggtccgccacctcaccgtactgtaggaccgacgcatcgccaaaatcattaaaaaataatgctttcaactaatcacccgtcttttctaacaaatcgtcaatacggcccgatgctgttaccaacgtcaagaaacggtggttccaaatccgatcttgataaaaatcaatcgtttgttgcgcactcatcatggaattggccgtcgttgtcgtcaacccccgaaccatttcgaggtggtagcctaacccatgagccattttaaccgtcgtatccacacaaaactcaacttgcgcaccacagatttcaagtgtttgacatccaatcgccgtcaattgggcttgtaaatccgtgtgataaaaagcgttggcgtgcgttttctggaccacaatatcggttgcttcaattggcaactctggtatcatctgccaatcggcagaaccagtgactaagtcagcatcgtgatgttgcacaaacacgattggcttattttgagcccgataactcgtaatgcgctgttgaatacccgcaatcacggttgccaaattggcaaccggttgggacccgcgacagacaccaacttgcatatcaataataatcagtacatccgccatgttgagccctccttaaattaatttaactggcttggttagcgtcaactattattaacgacgcccacaaagcagtaagctgtttttagactagcacattatcctagcgtttcccagcatttaatcgaagtagcccggcacaacaacatcgtaacaaacaagatcagtcaactgtatcagccgtgcgaccatccaatgcgcgccgcatccgtcgcgtatagtctcttaagactgctgtcgctggttggtgcgtcgcaatcaaatgcacgactgcactaccaacgatgaccccgtccgcaatttgtgccatggcctgggcctgggctggctcatggataccaaaaccaattgcgacaggtaacgtagtcgcatggcgaatcttcgccaccagtgttgctaaatcagtcatgatgtgtcgccgggtccccgtgacacctagtgatgatacgacataaatgaagccccgcgcctgctgggcaatcgctgcgatgcgtgcatcatcactcgttggcgcaatcaatggaatcaaagcaataccatagtggtctaaggttggtcgaagttcaccagaggcttctagtggcatgtcgggaataatcaagcctgcgacattcaaactttgacactgctgggcaaaggcagcataaccaaactgataaacaatgttcgcataggttaaaaatacgagtggaatagttgtcttctctcgaattgccaccaccaattcaaaaacgcgttggggtgtgatgtgttggtcaaacgcacggagatcagcggcctgaatttcgggaccatcagccacagggtctgagaacggaatgccaatctcaacgagatcacaacccgcttctgctaacgcaacaacttggtcaactgtcgcttcaaaattaggatcaccggccactacaaaagcaataaacgccttatgatttttaaaaattgttgttaaatcagtcatcaattgtcacccctcgatactttgcaattgccgccacatctttatctccacgaccggataacgtacaaataatagtttggtcacgtcgcatcgttggtgctaattgttgtacgtaggcgactgcatgggcactctcaatcgcacagatcaccccttcgaccttagcaatcagttcaaatgcttgtactgcttggtcatcggtgatccccacatattgcgcccggccactcgcagccaggtaggcatgttccggtccgacgcccgggtaatccagcccagccgagattgaatagaccggggcaatttgtccggctttatcttgtaaaaagagtgacttcatgccatggaagataccagtccgaccacgttcaatcgtcgcagccgtcaacggcgtttgaacacccttacccgttgcctcacagccaatcagctcaactgacgtatcatcaagaaaagccgcaaaacttccaatggcgttactgccgcccccaacacaagccacgacggcatccggcaaatgacctgtttggtccaggatctgctgtcgggcttctacactgatgacactttgaaattcatgtaccatcattggaaatgggtgtggtcccgttgcagagcccatgatataagctgtatcatcacagcgccgcgtccactcttgtaaggccgcattgatcgcatcctttagcaccattgaaccagtcgtgaccgggtggaccttggcccctaatagttgcatccggtaaacattcaatgcttgacgattcgtgtctttcttacccataaagacgtcgcattccatcccgaacaaagcagcaacagttgcagttgcgaccccgtgctgtccagccccagtttcagcaatcaatcgctttttgcccatcttctttgccaacagtgcctgccccaagacattgttaatcttgtgcgcacccgtatggttcaagtcctcacgtttaaaataaatctgagcaccacctaattgatctgataatcgttgtgcatggtacaacaacgatggccggttcgcatagttattcaacaagtcagtcaactcttcttgaaactgcgcgtcctgtcggtaatgttgaaaggcgcgatccaaccgctgtagctcggtcattaatgtttctggaacgtactgaccaccaaagtcgccgtaacgccccgcctgtgattgatttttaatcatactaattcctcctaatttctgttaataatggtgttgacacgcccgtttggtgcgcccgttggaccatcagattgattttttcacggtctttattgcccgccgtctcgacgccactagccacatcgaccattgccgggtacaccttgttgattgccgttacgatattcgtcggtgttaaaccaccagccaagataaacggccggacgggacgctgtgattgtaattgattccaatccaacacctgtccactacctggacgggcattatccaataataagtaatccgcttgacattgcgtagcattcgctggcgtcatcgcttgaatcaccggcacatgggcggccattgaggacgcaatccgaggatcatcgacggtagcgtgtagctggaccacctgaataatgtgttgttgcacgagagctaaaatttccgataattgattagttgtaaacacgccaacacgccggatacgcggatctaattgctgtgacagttggcgcgcggtcgccatcgtaatccgtcgtcgacgaccgggggcaaataccatcccaattgcgtctgggagcgcttgattaaccatcacgacatccgctggtcgcattaagccacaaattttgatttgagtcatccacgcacccccgcccgcaattgcatgacggcttgacctttatctggtgcacgcatcaatgtttcgccaactagcatggcgtcaaagccagcagcggccaactgttgagcctgtgtggccgtttgaataccagactcagcgaccacataacactcagctggaactgcttgccgtaactgacagctcgttgcaaaattgacactgaaatctttcaaattccgattattaatgccaataatccgggccccagccgccaccgcttgcttaatctcagccgttgtatggacttcaactagcgcacttaaattcagctcatgagccaacgtaatgaaagcctgcagttgaaccggtgttaaaatagcaacaatcaataaaaccgcactagcaccagcaatacgagcactcgcaatctgactagcagctacaataaaatctttacgtaatgtgggtaccgagaccgtttgcgcaatggcttgtaagtaagacaactgtcctttaaaataccggggttcggtcaacactgagatggcatcgatcccagcagcaacatagtcttgcgcaatctgtaaatagtcaaactcagccgcaatcagccccttagaaggtgacgcccgcttaacttcaccaataagctgtaagcccggctgggccagcattgcttcaaatgataaaacgggggtggtcatttttcgagcttgttgaatgcgcttcacacgctccctaactggcaccttctgaacccattgctgactcgcctggacgagttgatctaaaatcatgaggccatcaccgcctgactactctgaattaattgggccaacttagccgcggccgctccttgatcgattgtttgctgggccaactcaaaagcggccgctagatccaactgtggcttggcaatatgcaacgccgcggcggcattcatcaacaccacgtcacgaggggcccccggttctccagtgagtactgcccgcgtgatggcggcattaacttgggcactaccaccaataagagccgcatggtcacaacgcgtcagtccaaactgttcaggcgtcaggattcgcgttacttgctgcccatgattaattacgatcacatccgtaggggctgccgctgaaatttcatctaagccgtctcggctatgcacgaccatggcatgtttaacatctaaacgcgtcaacacttcggctaatggagccattaaagcttgccggtatacccctaatagttgcatctcagcatgagctgggttggctaagggacccagtatattaaaaatagttggaatcttgatttgttgccgagccggagcgacaaatcgcatcgcctgatgatattcgcgcgcatacataaaggcaaaattggtccgctctagcaatgctagactctgagcgggcgttagatcgattttgataccgagtgcttctaaaacatccgccgcaccactcttggacgacgccgcacgattgccgtgcttggtcactggtacacccgcagcggcgaccactagcgcagtggtcgtcgaaatattaaacgaattcgaccggtcaccgcccgtcccaacgatttctagcgtgggccgtttaactttaaaaggtaacgcctgggaacgcatcgcagttgctgcaccagcaatttcatcgatagttgcctttttgatggctaaggcggtcaaaaagctcccaatctgtgcgtcggtggcctgacctttcataatttccgtaatgacttgttggctcattgtaaagtctagattttcttggttagtgagttgtgcaatcgctgtttcaatcataagtattcctccactctcgtctgcttaatgtttaagtgctaaaaaattacggatcagttgctcaccaacggcggctggcgtcatgattgattctggatgaaattgaacgccgtacagctgacggcccacatcttccactgccatgatttcctgatcatcgcttgtcccaatgattcgaaagttaacgggcaaacggcccgcatcagctaccaacgagtggtagcgcgctgccatgaactgcatcggacaatctttaaatagtgatgacggctgcacgtgcattaacgtggcttgcccgtgaactaaatgctgggcgccttgcagcgaaccgccaaaagcggtgaccatcacttctaatcccatacaaatccccaatatggggacctgaccagctaattgttgcacgacttgtggactaactcccgtgtgggctggcgtccccggccctggtgataaaatgatatggtcaggttgtaatgccttgattgcagcaaccgtcaaatcgtcatttttaatgacccgtacatcgggcgtcagacgaccaattagttgatacaagttataagtaaagctgtcatagttatcaattaataattccatctttaactcgtcctttcgcgtcttgtactgcattaacgatcactcgttgtttattctggcactccttaaattcttgagcgccgatactgtcagcaacaatgcccgcacccgctggaatcaccaaccgttcatttatccggtaggccagccggatgccaatcgccatgtccaaattaccgttacaatccaagtaaccaaagcaaccaccataaacaccccgcggcacctgctcataatgattaatcagggtcattgcttcaatcttaggcgcgccagctaacgtcccagctggaaaagtagcggcaagcacttggagtgctgtagtagtcggcgccacttctgcggccactcgagaccctaagtgcatgacttgcgaataacgaattaatcgccgtaaattagtcacccggacacttttaaactttgcaacttgtcctaaatcgttacgtcccaaatcaactaacatattgtgctcggcaatctctttagggctggtttgtaattcatgagccaactgccgatcctcggcaggtgttcgaccacggcgtctcgtcccggccaatggatacgtcgcgacttgttccccatccttcgttactaacgtttctggtgaggccaccgtcatttcgaaattagcctgtttaaaataacaggtatacggggccgctgttttttgaagttgctgataaactgccagcaatgacccgctcatggtccccaaacatggattagcatatatcatttggaaaatatcaccagcgtagatgtgttggcgaattcggtcaacctgacgcgcataggtcgcttggtccacttgcatgtgtaatggttgctgcaagtcaaatggtggcaaagctattggttgctgcaattgttcaataatggcggctaactgttgcgttagagccgtttgagtcacggcgtaagttgccgctaaatccgcagttggaatcagctgtgtcaacccaagctcatgatgtcgatgatcatagacgagcacactcgtaactaagaataaacctaagtcatcgagatctgcggttgctggtgatttcaaatgcaacttgggtacaaattgttgaacatactcatagccgaagtatcctatcaagccccccgtaaatggtggtaatccatgaattcgtggtgttcgatattggtttagaatggcttggagtgtctcattagctggtcgttggtgcttggctagttgccgacccgtgagacttcgctgtggtttaaaactaaaatagctatatcgttggtgccgatcaatcgtcagcgcgaaaccgttccccatctggtggataattttagcaaccgcaatagggtcaaatgtgacgagtggtcgtttgaccatcactggtacgtagggataatgatcctgataaggaatcaaggttggtaatgttggattcatattgaaccactcctcattaataagatagttttacttgagttgtggttaattgccatcgttgctgcattgaactgccccctatcaaaaaaatccgtccatgactaatgacagtcaaggacggatttttccgcggtaccaccttggttggacaccaaattaccccattcaggttagacttgggtcccagcttagcgaaatgcaaacacattcccgggaattgacgactccctatcgtcgcgaggtagtagaacaaaactgttcgttagtcgcgccctcagtggtccatttaataatttgcgttcgatcgcactctcagcaacggcgactctctttacgggcatcattatcttgatctccacttcatcggtttcatggacgaatattaagttgtcattaacattaaaactcaatgagcaatttgtcaacacttttatcttaatttaatattatgtgactgtgaaattaacacttattagtcaagttgctgccaaaaagtcttgtagtaatgccagaccaaaccagcagaaataattccgacgccaactaatacaatgatattaatcagcatagctgccgccgcgaacagctgaatcagcacactatagatcacaattgtcagcacacccacaatactgcaggccaacaagttaagcatcaaaccaagattaccgccgccccgattaaacaattgggtcacattagtccaattcgtcagccgtagctgataatcacgcttaaagtaatgttgggcagctaggtacgtcccccaagcagcgcccaatattagagccaaatctagggctaatggtgctcgcccagcgatacccaccactagaaccatcacgccattaatcatgacctggaaccaataacccaagtaaaacttttgtcgtaagtaacgggacattgggattggcagtgcacgcacaaagtcaaagttcattttatcaagtgaaatgagattaccgactaatgaggtttgattaacattgacgatcgcaccggccatcccactgacaaaccagacaccgagccagttcagcgatagccggctaaaattaggagcggtccccgaaaagaaaacggtcccgactaaaatcaatggcagcaggattgaatctgtgaataattgtaaggctaaactgggttctttcagtaactgaaactggtaggtacgcaaaattttattgcggttatgttgtcgtgaatgtcgacgcggtggtgttgccactaacactgagttgacttgcgtaagctgttccgctaagtgggtcaaaacaaaccgtcctgtcagtgcgaacaaaatcagcgagatgacaattaaactcgcccaggttagcaaactcgtcattgtcaacggcgtcgtgaaaactttaaaaatcggtatcaataggggtaatgctgcgcggtcaacctgcgttccggtgtcagatgatgagccgcgattcatgaagtagagcccgactagcactaagacagcgttaaggcctaacatgacgttcatcaccattttttgatgggcgcgaaacacggttagcttggttaagccaaaaactattagggcgcacaagcatagtaacagactcagtattaggccatacatcaagacggccatcagcacacctaacaccacaaagattccggcccgtgttgcggtcatgataaaaattaaaagtaacggaatggtaaagggtaccgtgttgaatatcacgaccaaaatcttactcataaaaatttcttgattgcggaaaggtaacggtaagtattcaacaagatcattgccggcaaaaaagacgttataaataccggagatactctgtgaaactcccaataagataaataacgccacatagaacgtaaacatgcctggcaacttgctaaaatcaaaggccaacatcgtcaagccataaatgccaagaaacatcaaggcattcaagtaaaattgccgcattagcttcttactcaaggctggccccgaagcgccctttttacgtagccgatccgttagttgcggattcaacaacctgagattaacagccaacaaaacacgtaactgacttttatgcatcatgctcaccctccagcgcatcgacaaggtgatcatccgtcaaccgcccggccatttgtaaatatatcgcctcaagtgattgttgcggatgttgagctagtaattgttcaaccgaaccggtataaatcaattgcccctgcttcaaaattgccaatcggtcacataactgctgcgccgtatccagattgtgggtggaaaaaatgaccgtcttgcctttggcagcatgggccttcatcaaattttttaaatcaaaagcagcttgggggtctaacccttgcagcggctcgtctaaaatccaaatatctggatcgggaagcaacgccccaatcaaaatggctttttgccgcatcccgtgtgaataactagccatgggttcgtcaacgtgttcagtcatatcgaacagtgacaccagctgctgtcgccgttgctgaacggcttcctctgattgctggtaagcggcagctatcaagtcccaatattccatcgccgaaagttgaagaaaaatatcgggtgtgtccggtacgtaagagatcttttctttgacggcttgtcgttgctgttcaaggtctaagccatcgaccgtaaccgtgccactcgtcggtttaatgatactgactaaatttttgatcgtcgttgatttccccgccccgttgtggcccaacaaaccgaagatttgtcctgatgcgatggttaaagtaagctgattcaatgctgtcttatccccataacgcttcgttaattcgtgaatttcaatcatgtgattatccccctagtcatcagttacgtttattataccggaatcgtccgaaaattcgaaaccggagcggtacgttgctcattgattaacgcttctgtcgccaatgactagttccatcacgaaactaacgatttcaccgatccagaagcatcagttaacctcaacttctagggcaagtttcatcagactgttgattaaaaaacatattgcaaccaagaaccgttaaatcacctgcccccaagatacttatgattctagttcgatcagggaccgtcttatttttaataattgtcatatacaagcaaatcatttaggaattttcatctccataaatcaagcacaatttatccgctggcattcccatgttaggcctttttgttacttacaattctgaaagaactccactaagtccaattaagaagctggtaccgttgctgtaacgcaaaaaagttcttctctgacaaggcatcaggccctatcaaggaagaactttaatttacactttgttatttaaataacggctttccatcgcctggcgggcaagaacagcgtcctcaaaatgctgaaacggcttgtgtaacaggtagcgccccttgtagaaaaatgtcgccacccatttttgagtattgctatcccagctgacaccgatgacaccactcttattacgcttagacataatctttgacggtaaatcagtgtgatgatcatgaattttcagattgcttaaccgccccatactggcagccgttttgggattacgtcgaattaactgcgaccgactttctcgtgtcaaacacccacagcttcttgctcgcccatgccgcaacgcgtacgaatcagctttggtctgattgccacagcgacactgacacaaccagagggcattgccatttttggcagttccacaacgtctaatgactgttaagcggccaaacttctgacccgtgatatcgattaaagtagtcatattaacgcctccatttaacggctaattatgacgtttcttcaaaattgcactcacaccaactagtaaggttgctgcggtcaaaccaagtagttccgccgcaacactagcttgccgattatcattggtttgcggtaaagtcgcttgtttgtgggtggctgattgatgagccgcggttggcttaacggatttagtcgtcttcgccagtttaaccgtttttacattggctggtcgtgtctgagcaggctgttcaacagcctgtgcttgtttgagatccactgaccgcttgacgctagcttgtttagcagttgttgttgcgacggtctgagccttatccggcgtcttgaccgttgcgactttatctggcgtgtcagtcgtcttaattttatccgacttattaactgtcaccgtcttcaccggtgtttttggtgtctcaccggttgaaggcctatcggtaacgtaacgaatcgtttgaacatcatccacgctagctggcgtaaccatgactgcctgagtacccgttaccaccgcatgatagcccggaatactgaacgccgcgacgcgctcaaaagtgtgatccgcctgattagtcgaccaattgctatacgttacgtccccggtgacctgatcaacccgtttagtacgagtgaatgtcatcgctctgaccgtatcatcgtgcaactacgtgccagtcgtactctgataatgtacggtttgcgtgattgtcttggtctcggttgtcgcagttgtcacatgtgcaagctgaaccagatagctgtgaacgacaccatcatcattgaaaatagctcctgaaactggatagctatcgcggacaagcacgtagccctgattactgtaatcagcaattgtgttagccgtgcggtaatcggatgatgtctgataatcgccagtcaaactgacggtcgcgagcgttttatccgtggtgacatcaacataggtgaccgtcgccttttctgcgttaatcgcatacgtcacaataatgttggtcggttgcgccgcactagttactgcatcgtttcccgtgacccgcgcccggtcagccgtatagccaataataacgggtgacgtcacggtggtataacgaccagtagctgaagtcccatccagccaatcagtataaactacggtaggctcaacttcatcaatcgtggcatcccgattaaacgtaatcagttgaacgctgtcagtgccagccgaagccccattttgataccgatacttaatcgtttgactaacttgtttcgtcagatcttgggcggtcgttcctactggatacttcggtccgtctggattgtctggatcaattggttggcccggcgtacccggattccctggtgtaaccgtaactaacttatgcttcagtgtcacggtataagttttagcaaaatcatcgacatcgaacagcatccccgatacgggataattatcacgtaccagttcataaccgtttttaacataacctgcaatggtttcagcggtccgataattggattgtgtccgatagtcaccagtcaaattggccgtaacgagcgttttacccgtcgtgacatccacataagtgaccgttgctttttcaggttttgccgcataggtgacgaccacctgtgtgtctgaatctgtattagcaactgaatcacgaccagcaacctgtgttttatcagccgtatagccagtaatgacgggtgacgtcacggtggtataacgaccagtagctgaagtcccatccagccaatcagtataaactacggtagactcaacttcatcaatcgtggcatcccgattaaacgtaatcagttgaacgctgtcagtgccagccgaagccccattttgataccgatacttaatcgtttgactaacttgtttcgtcagatcttgagcggtcgttcctactggatatttcggtccgtctggattgtccggatcaattggttggcccggcgtacccggattctctggtgtaaccgtggctaacttatgcttcagtgtcacggtataagttttggcaaaattatcgacgtcgaacaccgcccctgaagtgggatagttatcacgtacgagttgatagccattcttgacatagctcgcaatcgtttcagccgtccggtaactggacgtagtctgatagtcaccagtcaagctttttatagcgagcgttttacccgtagtgacgtctacatacgtgaccgtggcgttctctggcttagcctgatacgtgaccacgatgttcgtgtcagcatccgcattgtgcacctcgtcattacccgcaatacgcgttgaatcagcaacatagcccttaatttccggtgaatcgactggcatgtaatgaccagtcgttgccgtaccagtcaaccaatcggtataagttagcttattgttaacctcatcgaccgtcacgctgcgcttgaaagtgattgtttgcgtattagcgtcggcagcagtacttttatcctgatactgatagtgaatggtttgaccaacctgcttaatcaagtcttgcacagccgtacccgctggatatgtgggtccgtttggattatcggggtcgatcggctcgcctggcgtacccgggttctctggggtgagcggcaggagtttatgttgcaatttgacagtataagcctgagtacttccgtctttatcaaacacagcaccggatgttggataatcatcactgaccagttcatagcccatattaaggtactgagcgattcgatctgctgtccgataattcgagacggtctgataatcaccagttaccggatctgtcgtcagcaccgctcccgttgtcgtatcttcataggtcaccgtggctttttcaggattagcctgataataaacttgtacatctggactgagatccgtcccactcaccgtatcacgacccgcaacactggttgggtcagccgtataaccagtaatcgaaggtgaatcaacggcctcaaaacgaccagtcatggtcccatcatcagtcaaccaatccgtgtagacgactgtgccattaacttcatccaccgtgacgttacgactaaaattaaccgcttgaacattgttcggtttagcagtgcgaccatccttgtataaatactgaatggtttgactgacttgctcagttaaatcctcaaagtcagtccccactggatatgtgggtccgtttggattatcggggtcgatcggctcgcctggcgtacccggattatctggcgtgcgtgttacaaatttatgaacaagtgtaacctggtacttttgaacactgccgtcatggtcatagatcaccccggctgttggatagtcatcacggtacaattgatagcccgcattctcatatgcggcaatcgtatcagctgtccgatacgcatccgttgtcccgttcgctccttgtaagggttccgtcttaatgaccttgttatcagtttggtcaaaatacgtgaccgtcgcatactctgtgttcacggtatacgtcacaggaatcgtcgtgtcatcatcctgccatacaacgccgggattgccggcaacaatggttgggtcagccgtataaccagtaatcaaaggtgaatcaacggccttaaaacgaccagtcacggccccatcatcagtcaaccaatctgtgtagacgactgtgccattaacttcatctaccgtgacgttacgaccaaaattaaccgcttgaacattgttcggtttagcagtgcgaccatccttgtataaatactgaatggtttgactgacttgctcagttaaatcctcaaagtcagtccccactggatatgtgggtccgtttggattatcggggtcgatcggctcacctggcgtacccggattatctggcgtgcgtgttacaaatttatgaacaagcgtaacctggtactcttgaacactgccgtcctgatcatagaccaccccggctgttggatagtcatcatcgaccaggtcgtagcccgcattctcatacgcggcaatcgtatcagccgtccgatacgcatccgttgtcccgtacgctccttgtaagggttccgtcttaataaccttgttatcagtttggtcaaaatacgttacgatcgccgtttcagtcttggccaaataacgatacgtcacggtaccgccctgatcagttaacgtgccattataggctagtccagtattgggtgctaacacatagcccgtcttgggtttggctgccgtcgtgtaggtcaaatagtccgtggccgttgcgtccgtagcatgtgtcgccgtaccagtttccgaagcatctacctgagtctcaccattagcatctacatgttcgtagaggtacttaaccgcaatatcaccaattgtcaaggtgccaggaatgactgaaatggtatagtttttattcaccgaatcatcagcatcaggagtggccgtaattgtcttagttccaaccgcactcatgccgttggtcacacgatactttaaggtctcaccattaactgtcccagtaaccaccgccgccaaattcttttgcgtcccatccgaccaataaatcttgttgggaatcgtaattgttgctttggctggatcaattgtcagcgttccattgacatacgaaattttataattactggtatcggctgccgtagtcccagtcattgcataagtgccgaccgtagtataagtcgtcgcaccactgccatctgctgcaactgcggtaaatgctaactgatcataattggtcccgctagtaacagttgcagtcgtgccatgtgctcggccgtcataaactgcattatcatccttgaccgtgactgtcagatctgctggcgtgatcaccaacgtcccatccgtcgtggtaacggtatagtttttaaccaaaatcgccgcttgcgtgggatccgctaacgcgtatgtcaggttgtcataggtaccgacgttcgtgtcagtcgtcgtagtaaaatcaaagtgatcatacacggttccagtcgttacagctacggatgtcccctgaggcttgccattataggtcactgtatcattggctatcgttaacctgagaccagcagcctgcaccgcaccaatcgtggtgaaaactgccgcatcatccagaatataattcgaccccagcgcagcttgaactgccttcccaccagcgtcattaagggtgattgcatatttgccagtgtccgcaccggtcaagttagtttcggtgccttgatacgtataagtaaaatctgccaacgttaaaacacgttgaccgaccttgccggctacgcctggtttagcatcgccgatttcgccgttactaatttgaaggatattttgctttgttgcatttttaacggtgactaccggcaacattgtcaatgatcccgtatacaactgtgaaggccgaagtataattagcccattcttaccagtggtggctgtgatttttacagggacaatgttaattgtaaaggtataatcggaggccccagtcgaaaaggttgggacaaagtcatccaaatcactggtcgaggtatcgtaagcattatagtcttgcataacccggctcatcccagctttacccgctgcattgatcgtcactgagtaactaccaatttggtcgagcgttgaaaagtccgtatctccggaatatttcgtgacctgcccatgttcatccgtatacacaacatcaacgtaatcattgacatcagcagagtccagaaaaagtgcatatagcaaattgaccttgttgccgtttacatcttctaagtaattgcccgctgcatcttgaatgtagtaggcgacgtcgttagccggcgtctcatctggagaactaatatgagattctagatccgccagcgacgcctcgccatagtccatcgacacggtccccgtagttactaacgatacggtcggcttcgtttcagcttcactggtgatagctgaaaccgcctgtactgtagacttagtgaccggcgtgtttgctgacctgctcgctagcgcacccgtcaatgggagtgcccgacttgtcactgcagtcgtaatggtcggtgcttcagcagtaggtatgctggctgttttcccagtttccgtacgcgtttggctagctgtcgtagcatcagtgagatcatttgccactgatgaacttgtcgtctcagtgtttagcacatctgtgtcagcactcgtagtagccgttttagttacggatgctgatgtggcttccgtgtcagtagatttactggtgacacttggtgcactagcacttgcgccatcagtacttgatatgctagcacttgagtcagcgcgacttgaagcagtaccgacttcggcagctggcttcgtagctgctgtcgactgacgattactggaagctgatgttgccccagttgaatcagtagtcgctttagtatcctgagtcgcggccgttacatcagtagcagcttttgcatcctgagtcgcggtcttagtaactgtcgccgtactagctgattttagtacgacggcattgctcggttctgccatgtcggaactaacgctagcgctattgtcggccgtgtcaacccccgtacccgttgcggctttcacttgttcaacttggctaaaagtcaaaccgatgccaactgaaaatactgtgatactagcagccacccagcgccgccccgatttataaagcttatagtgagacttactttccaatcccaacttatttaaacgattccgcataattctgcctccaaagttcaaccgtacctggagcaatcaagttatttagctgagtaatatttggtgcgtttcgtaccgtgccgaaacgattgtgttaatcaacaaactatcacctaattgaccccttaaatcattagtatgcgttcaaataagttgaaataacaagtgcataacaaaaaatagacgaaattatttttgagattatttaattgtagtatcagttcacgctataacactgcattaaaatactgatataaccaacatattgacacacttattttgaatctggctcatccacatcccagttcggtacttatcaaacaatgtatagcatttgttctacggccaaaatcgtttaccagctatttagcagcaccaaacaatttttatcgcccgccaaccatatcacctaatattgttaagacgcgcagatcatgaactgtttttccacaccaaaaagcccctctgaataggtttcattcaaaggggcacggacatgcgcacgatgttctcatttaagctgttaccaacacacttccgatgaacgccagcctcttacgttcaaaaaccatcgtcagccgtctgaagacggtctggtttcgctagtaacttcatcactgacacaccctaatctaaataggtactatgcatcccaatatagcctaaattcgttcccattggtttggccgcgactaatattggataaatctgatcataaaagtttgaagcagccttcgaaaggcccttgttgcgtagcgcctccatttgaaaactaaccactaatttatttaacacagcaattgaatagcgatgatgctccaaatcggctttggccatcaacccgattttacgttcacggtcggtaagactagtgtcgagaacgaagtcaactaactgactcaataacgcctgttcatcgacctgatgtttccccgtacatccaaacatcggctttcacctaactctcttttattttatcgtgctcgctttgagcaatctcccgtttagttaacccggccgccagcttagcactagttatacacgtcaggtacgcgacaaccctgttcaaataaatcagtttagtctgatatcaagtgattcatattcagctaattgacgcatcccaagaagcatcgcgtactcgtattactatcataatacttcaaattaggaattacgagctatctcgtaagattgttaaattataaatccaagcacagcatgctcacattgtgaaccgacctaaattggtcgatgatttgacgattgagcgtgtcactaacttcgccaataaaaaaagctagttaatcattaaaaatgattaactagctttccatcatcagctcagcctaagctgcaaccgatgattgttgacgttgtgatttagccacgacgacgttctgggatccgagcagccttaccatgtaagttacgtaagtagtataacttggcacgacgtacacgaccttgacgaacgacatcaattgcggcaacgcgtggtgtgtgtaatgggaatgtccgttccacaccaacaccgttactgatcttacgaacagtataagtttcgctgataccggaaccatggcgcttgataacaacaccttcaaataattggatccgttcgcgagtaccttcaacaactcgtgcatgaacacgaactgtatctccagcacggaaatcagggatgtccgtacgaagttgttcattggtgatcttttcgatcaattggttttgacgcataatgtatttcttcctttcgccgacattcgtgacaacctggtcagcggaacatcgttaatgggcacaatagccaataaatagaataccatattcgagggtgggcacgcaagtttttttgaactcttcacgactaacttgtcctaattaacggcatagcctacacttccgactcatccgccttgatatctgctaacatctgtttagcttttcctgacaatgatagccccgtcaacatgtccgggcgccgttcataggtccgtttcagcgcctgttctaagcgccaatcatcaatttttccatgatcaccactcagtaagatatctggtaccttcataccacgaaaatcagcaggacgcgtatattgtgggtattccaggagaccgctcgaaaaagaatcccccggagccgattccgaattaccaagcacacctggtaagagccgcaccgtcgcatcaatcatgaccattgcacccagttcaccaccagttaaaacgtaatcaccgagcgagacttcatcggtgactaatgaccgaatccgctcatcataaccctcatagtggccgcaaataaaggtcaagtgttcttcctgagcaaagtcttcagcaacgtgttgattgaactggactcccgccggatccaataagatcacgcgaccgggtgccgggtgtttttcctgaacgctggccaaagcatcaaaaattggttgtggttggagtaacatgcccgcaccaccaccatacggataatcatccacatggttatgcttgtcggtcgtaaaatcccgaaaattagtgacatcaacattgatgacgtcattttcaatggcattgccaatcatcgactcatgaagcggccccgcaaacatctctggaaacaggcttaaaatatcgatttgcattaatcaatcaacccttccattagttcaacagtcaccacgcccgcatccaagtcaacatctttaatgacctggggaatcttaggtagtaagacgtcagactgaccatgatcccgtttgaccacccaaacatcattcgcaccaggtgacagaatctctttaatagtccctaaaggctcgtcagcggtcgtcacaacttgtaggccgacaatctggtgatagtagtactcacccgctggtaaggcatgtaatgcttcagcaggaactttgatcgtccaccccttatagcgctccacatcattgatgttatcgagcccttcaaaggtaagaaagtacagccccttttgctcacgggccttcgcgattttgacagtaatcccgccagtcgtttcatctggggttttaaataaattcaattgttgccctactttaaagcgttcttctggaaaatcagtcacgacaacgactttcacttcaccacgaatgccgtgggtgttaactagggtgccaacacgatagtaatccattagcttcctcctcttaattagcttgattgttattcgttttaaatgtcatcaacatgttacaactaatctactcaacgacggtcatcgagatactttgactcgtcctcaaaaaccggaacaagatataaaaaaactcttaaacaaaacatcactgcttcgctcaagagtttttttgttgtccgtcttcgatcgtaagccggacacgtttaggtcctgaaactcggacactatacacaattgtccgaattgccgaagcaacccgtccctgccgaccaatgacccggccgatatcttcgggattaaccgttaagttgtattcaagataacgcgtggtttccttaaaatcaactttaatatcgtctggatattgaactaacggggtgacaaccgtggtgattaaagctttaatatctgccatgatctattaccgctttattatttagtgaacttagcttcgtggtacttcttcatgataccggccttagataagatattcttaaccgtatctgaaggttgggcaccattgttcaaccaaccgaggatatcttcctcttcaagtttaacttgggctggttctgtaagtgggttgtatgtgccgacttgggcgataaaacgaccatcacgtggtgaacgtgaatctgcgacaacaatccggtaaaatggatttttcttagaacccatccgctttagacgaatcttgactgacatttaaacacctcccgaattctttaacaggtaataatataccagtaaatcaatagcttgtaaaggactttttcttgacaggctaaaaaaacttataaattagcgtttgcgacgccgcattgctttggctaagcgcttttgttttttcttcttagtttgacgaaccattcgcttcatggccatttgttgcatcttaccaccgataccgccaccgccattggcaccacccatgagaccttccataccagcaaagttccctttggacatttgattcatcatctttttggtctggttgaattgcttgatcatccggttgacttcatgaattggccgcccggaaccagccgcaatccgtcgacgccgagatgggttcaacaaatccggatctgctttttcggcattggtcatcgaataaacgattgcccggatatgggcaatgtctttcgggtccatgttgatatttttcatcgctggattgttagccatgccgggaatcatcttcatgatatcttccatgttccccatcttgtcaacttggtctaattggtcgataaagtcattgaagtcaaaagtgttttcctgaatcttcaggttcatttcttcggcttgtttttcgtcatattgctgttgcgccttttcaatcagcgtcagcatatcacccataccaagaatccgatccgccatccggtctggatggaagacatcaagatcagtcatcttttcgccttgaccgacaaacttgattggcttaccagtgacggcccgaattgatagtgcagccccaccacgagtatcaccatctaacttcgtcaagacgaccccggtcacatccagcttatcgttaaagccctccgccgtattaacggcgttttgaccagtcatcgcatcgatcactaacaaaatttcgtcaggatgaacgagatctttaatattggccaactcgttcatcaactgctcatcgatttgtaaccgaccagccgtatcaataaacacgtaatcattgtggttttcttgtgcctgtgccatcccttgacgcacaatctcaacgggatcgacatcggttcctagttggaagactggaacgtcgatttggcgaccaacttgttgcaattgttcaatcgcggctggccggtaaacgtcggccgcaatcattaatggtcgggcatcctgttcgttctttaatttgagggctaattttccgaccgtcgtcgttttcccggccccttggagcccagccatcatgatgaccgttggaatcttcggcgatttgttcagtggaactgccttttcacccattgttttcgttaattcttcatcaacgattttaacgatttgttgggctggatttaaaccttccagcacctttgcgccgagcgcacgttcgcgaaccgttttaacaaaatccttgaccaccgtaaagttaacgtcggcttcaagtaatgctaaccgaatttcacgcatggttgctcgaagatcactttccgaaatcttccccttgcgccgtaaattggtcattgctttttgtaaacgttccgttaggccttcaaatgccattagtgtcacctaacctttattattattctgagtcagcttccaagttgactagttgttgaatcatcttaattaactgggtatccccatggtaattttgcttaatatagtcagagatcgcgtcaacttcgtgattacgttccacaaagtcgtggtagagatgcagcttagcctcataaccttctaaaatcttttcggtccgcttgatgttatcatagacggcctggcgcgaaactgagaactctgctgcaatctcgcctaaggaatagtcatcagcgtagtacagttgaatataggctttttgcttattcgttaataacggttcataaaactcgaataacgaattgattcgataatttttttcaatttccatgtggggactcctcacgcttatcatacagactacacactaaataagagtaccgattttatcgccattcgtcaactatcagtcgctatttgtggtaaaaataaatggtaatcgtcctcgtgctgagaacaattaccatttcgttaactggctttcaatttaagaccatcatcaactgatttaacccgtgataatatctttaaataacccgtagacaaagtcattggcattgaatggtcgtaaatcagtcaccttttcacctaaaccaacgtactttacagcaagatgcaattcattacgaatagctaagacgatcccaccacgtgccgtaccatcaagtttagttaacacaatcccactgacatccgtcgactgtttaaacaacttggcttggttcagcgcgttttgcccagtcgtggcatccagcaccagtaagacctcgtgtggtgcatcagggatttcacgggtgatgacccgcttgatcttttccaattcattcatcaagttgactttgttttgaagccgaccagcagtgtccacaaagagcacgtcataatcttcggccttagccttcttaaccgcgtcaaagcaaacggccgctggatcacttttttcggccttagcgaccacgtcaaccccgtctcgttgcccccagacttgcaactgctggattgcaccagctctaaacgtatcacaagccgccaacaagaccttcttgccttgctgcttgtacatgttcgccatcttaccgattgtagtggtcttaccagcaccattgaccccgacaaataaaataacggttggaccactcttagccatgtgaatcgagttatcctcgccttcaccagcttcaccgtacatatcaacgagcttttcgacgatgacgcttgaaatttctttcttgctcttcgcgttctttaatttaacttcgtcacgtagctcgtcactaattcgcatcgcggtctcataacccacatcagattcgatcagcgtatcttccaaatcatcgaagaacgcttcgtcgacatggcggaaattagccaagaaggcattgatacgatcaccaaacgttttccgcgactttttcagtccttcatcataacgttctgcctcagttggctccggctcagccgattccgaatcagccgccgcattaacagtcggtgcggcggattcagtcgctgttggcgctgatgacttgactgctggcgccgtactagctactgattctgacatagcgttgccttcaactaccgcatcagacttagtcgctaacgccacgtcgctcgcggccgcttgactaacttgtgccgcactcgcacttaatgcagctagtgactgggcaaccattgcactggctgtgagtggcgcttccgacaccgtcgccgattgcattggtgcttgtgaaccagactgtgcactcactgccgccgtgctatcggccggggcttcactagtagctgccgattttactgtcgctggttcgtccgcagtgcttgtcgcttcgcttacggctgtactggacaccggtgtcgcagttgattcagttgttgcgccctccgagcgagctaactgttgtgacgaaggggcccggtcgtcactgaccggtgcgttagcttgactcgtcgttgcaggtgcttcactggcagctgacgttgtttgagcgtcatctgattctggtaaactaaacgctttttttaaccgactaaatagtcccatcttcaacacttcctttaattatttttgttcatcttttaaatctgccaaggagactgagaccatcttggagacacctgactcttccatggttaccccataaagtacgtcagcgtgcatcattgttccttttcgatgagtaatgatcacaaactgcgttcccgtttgaaaatcattcaaatactgactgaaccgatccacgttggcatcgtctaacgcagcttcggcttcatctaagatactgaatggcacggggcgcactgctaaaatggcaaataataacgtaatagccgttaacgcccgttccccaccagaaagtaaacttaatcgctgaaattttttgcccggtggctgggccatgatatcaaccccactggtcaataaatgttctgggtcggtcaagatcaattcagccttaccgccgccaaacatctgttcaaaaatcgtactaaattcgctagcgacttgatcaaatgccgttttaaagcgggtggcaacggtcgtatccaaatcagccattgtttgcagtaagtgttccttggcttcagttaaatcggaagcttggttattgagaaagtcaaagcgttccttgacccgctcgaattcgtcaattgcgccgaggtttaccgttccaatctcatccaagcctcgtttaagcagtttcaactgttccgtaatcgcaggtaacgctaagtcactgacgtcagcttgtgccgcggcaactgtcaactggtacttttcagccagatcagccgtggcgtggtcgacttcgccagtcaattttgtttggcttaattccaagcgacggtaatcatccgttgcggccgctgcgagttgttgcaaccgaacttgctgggtcgataattcttcaacctgatcattaagcgttgctagctgttgttcacacgttttccgttgttcttcaaccgcagcctgtttagccttagctgttttcaagaccgtatcgcgttctgcgaccgacatttgctggctcgctaacgttgttttaattgctgctaaatccgcttgaatttgctttttcgtctcttcattttgcgccaaggtcgcctgacattgttctaattgtcgttgcgtttgtttcacgtgttcctgcaacgtgatcagttgttcacgctgggcttgtaatttcgtcgtttgagtctgttgataactttcgtaatccgtttgctgttgttggactgttttcatttggtcctgatagtctttaagcttagccgcattagccgcttgcgcttgctgattacgagccactaagtcttcatagctatcatcagcttgcgtctgttgctgctcataagttaaagccttaacttgacgacttagctgcgtttgctcgctctgtgccgcctgtaactgggcctgtgtctgactaaggcgatccttaagttcacttagttgttggcgggtcgtttcaacctgaaccgtcaagtcttggttagcttttttaaggtctgctagcccttgttcataggttactaattcagactgcatctgggcaacgttagctgcaattttttccgcggattgttgctgttggagtagcccattatcatcatggcgagtcgcaccaccggtgatggccccactggccgcaatcgtttcaccatcaatggttaccaatttgcaccgaaaacgtctgctccgtgaaattgccatcgcgtggtctagcgtgtccacaatcgccgttgttcctaacaagtaacgtttgattgccgtcaatcgtgattcacaatcgaccaactcgctagccacgcccaacacaccaggttgttgtgataaatcgcgctcagtgttaacgggaagttgacgagccgtgatccgctcgataggcaaaaaggttgcccgaccggcgtgattttgttttaagaaattaacaacagttttagccgtctgttgtgtgtcacaaacaatattttgcaactgtccgcccagtgcaacttcgaccgccttagtatactgatcaggaacggtcaggagttctgaaacggccccggcaacgccactaaactgttggcgatgttgtaagaccattcgaacgcccgcataaaagttcgtatagcgttcctgaacagcttgcaacgcctctagccgtgacttttcacgctgcatcaagccagccgcgtctaaccaacgttgctgttgctcgtcgatccgctctgcattcgtttttacttgggcttgttgggctgttagcgtggcctgctgctgactgacttgattttctaaatcacgttgctcacgattgtgcacgtccacggtcgtctgcacccgtttcaagttagcctgagcctgagctagccgttctgctaacgctgtgctctgactgccagactgttgatgttgcttaacgaggttcttcgcttcgttattcagttcagcctgaacttgtttttcatcaatataagcattgcgtaatttttccagctcatcagccaactgctgacggccggccgcactcgttgccgtcgttaactcggcaacttgcgctttgactgccttaacttgggcttgctgctcagataatgtttgttctaattgggtttgttgctcggtttgcgtcgcaatctgttgctcagttgcggtcaaactggccgtcagccgttcctgctcagactgttggttttgccgccgttcagcgtcaaccccttgttgtccttgcgtgttttcgatggtcttaatcagctcaagattttgtgctaccagctcatctttttgctttaattgagctgtctgctgggtttttaaattagctagcttggttgccccagcatcaacttgttgctgatacttagccactaacgccttggcactagctaacttttcattgacaccttgcagttgatcacgagcaatcgtcaacttcttaacgagccgcgaacggtccaaataatcaaatttttgtttttgatcttgataatcccgggcaagactcgcttgttcttccaacggccccttttgctgattcaattcagcaatgatatcgttcacgcggtctaaataatccgtcgtttccgctaatttattctccgtcgtgaacttatcctttttgtactttaagaccccagcgacatcttcgataatgctgcggcgctcttctggtttcgcattaaagaccgcctcaacacgaccttgagaaatcaatgaaaatgagtcttttcccagaccagtatcaatcatcaaattcgtaatatctttcaaccggcaactctgattattaattaaataatcgctgtcaccgttacgaaagagtttccgcgtaatactaacttctgcgtaatccaaaggtaaaaagtggtcactgttatcaaacgtgatcgtgactttagccatattcaacggttttcgattagccgagccggcaaaaatgacgtcggtcatcttagtgccgcgtaaacttttgacggcctgttctccgaggacccagcgaatagcttcaataatgttactcttaccactaccgtttgggccgacaattcccgtcattccggcttgaaaatcaattttggttttatcagcaaatgatttaaatccgctgatttctaatgatttaagttgcattcgacacaaacttcctgtaattattaatggttacttttgctgtaattgtgaataagcttgccgagcagcgctctgttcggcttccttcttggaatgcccccagccctcaccgattttttgaccatcggcaagtacggcaatctcataagaccgctcattggctggaccatcttgttcaattaattgatagtcgattgcgacatcgccatcccgttgcaagtattcttgcaaggtcgtcttataatcaaaaacgccatcaaaacgaccctcatccagcttaggaaaaattacttgatgaacgaacttcaaaacaggttcccgtccttgatccaggtacaatgccccgacaaatgattcaaaaatatcacataaaagtgaatctcgttcccaagcatgcgctttttgttcgcccttgcctaaccggatgtactgaggaaagtcacattcacgggcaaagcttgcaaaactttcttcacaaaccatggcggcccgtaaacgagtcaacttaccttggggcatgtctttataacgtttgtataaatattcggacaccactaactccaagacggcatcccccaaaaattcgacccgttcgtaatacttcaactgttggtcctgatgttcattgacatacgaggcttgtgtaaacgcctccgccaataaatcgggatcgttaaacacaatgccaaaccgttccttcaacattgcagctaattctgtaatcatttgaaacttcctttcgttatcattctatcgactaaccccattggatcagccagttatcacaatctgttactggtggtgcctaacttagcatgaatcattatttaaggtggtcattcatctgccgttcgagtgcttccgacatgtatttagtgctactcttacacgcaatgttcagtctcacccagccgtggcagtcgaccgtggatgatcagaagctaacaaaatagaaacacaagttaaaggtccgcttaagtaaggattcatctgataatcagtcagtcaacaggtcacacattgcatatcataacattatactatgatttagtggtcaataacaatgatatcggtactttcgtagtcagacaagtaaaaacaggtaaccatgttggctacctgtttttgcttggtcaattaacttattttgcttggtgcgctgccacgtaatcgacgacttcgccgaccgttgacaatttttcggcatcttcgtctgagatttcgctaccaaaggtgtcttctaattccagtacaaactcaacaaaatcgatggaatcagcatccaaatcggtttgcaagttcatttcgttggtaatcgttgctttatcaacttcgaaccgatcagcaatgatatccgcaattttatcgaaaatttcttctttcgtcatgtaaagatccctcactaacttgaattcactaaagtattctaatcgttttcagcaggaatgtctacacttgcttgctgattagcttgttgattagcaaaatattccgcaactcctgggacgatatccgtactgaccatctggcgaatttgacggatagtattcacgattgttggcgctttgctggaaccgtgcgtcttaacgaccggcgccttcaatcctagtaagaccgcgccaccgtactgagaatagtccatttgagaccggatttcattaaacccattcttaagcaataggccgcctaacttgccactgataccggtgttatagacggcatctttcactaaaccgagcatggaacgcgccgtaccttcaatgctcttcaaaacggcgttacccgtaaaaccatccgttacgacgacatcagcaaccccgttcaacaagtcccgggattcaacattaccgacaaaattgataccgtcagtctgtgacaagagttcaaacgctgccttatggaccttatttcccttgtcatcttccgtcccgttattgagtagggcgacccgtggatgcttagcttgcatcatccgttctgcatagtacgtccctaacacaccgtattgttgcaagttcagtggcttactatcagcattagcaccaatatccatcatcacaaagttcgattggttagcattgcgtaccactggcaataccgtcactaatcccggtcggtcgatgcccttgatccggcccacgataaataacccggctgccagaacggcccccgaattaccggcagaaaagaaggcgtccgcctgaccatccttcacggcctgagccgccattacgattgatgaatgcttcttacggcgaacggcacgtacgggttcatcctccatcgtaataacttcatcagcattgatgatttgaatccgatcacggttcttcagttgcgcgttaatcacgtcgcgttgaccatataataaaaagaccgtatcctcaaacaaatcacgagcctgctcgaccccctcgatcacagcgttaggggcgtaatcgccacccatggcatcaatcgcaattttaatcattgtgtcaccattcctctcatcacagtactgtatttaggttattaatcgagcgtccccaccgcagccaacttctggctcaaataggcggctagtgcccgattatccggttgactttgccaatccggttgctgcacgattgcgtgggcatcttgctgggcaacttgtagcacggtcaaatccgcaatcggatcacccactttaaattccggcattcccgattgcttgacccccagcacatcaccggctcctcgtaattctaagtctttttgtgccaaaacaaaaccatttgttgtctgcgtcatgatctgcatccgctcaatcccttgctggttcttgggatcagccaccaaaatacagtatgaagccttggtcccacgaccgacgcgtccgcgtaattgatgtagttgcgccaagccaaaacggtcagcatcataaatcatcatgattgtggcattcttgacgtcaacacccacttcaatcacggtcgtggaaacaagtaactgaatgtctcccgccttaaaagccgccatgaccgcgtctttttcctcaggtttcattcgaccgtgcaacagtccaactttaacactcgccccaaaatactcttgtaaattagctgacagagcctcggcgtttttaacatccagcgtctcggattcctcaatcaatggtgtcaccacataggcttgcgatccattgtcaatctgttgatgaacaaagcttagcgccgaattagcttggttgctccgtacccaagtggtttgaatcggttgccgaccagccggtaattcatcaatttcagaaacgtccatttcaccatacgccgtaatcgccaatgtccttggaattggtgttgccgtcatggctagtgcatcaggttgcccgcctttttgacgaaaggcggcccgttggttaaccccaaagcgatgttgctcatcggtaataactaatcccaaattagcataagtcaccccgtcctggatcagggcgtgcgtgccaatcaataagttgatctcaccagcagccagcgctgctaacaatgtcttgcgggcagctggcttggtcgcacccgttaacagcgcaacgttgacatccgtgtcggcaaagacctgggccaagttatttgcgtgttgttcagccaaaatttcggttggcgccatcaacgcggcctgataaccagcggtaatcgccgcatacatgacaatggcagccacaatcgttttcccggaccccacgtcaccttgaagcaaccgattcatatgcttcggtgacttcaaatccaaacaaatttcattgacgacacgtttttgggcgtgggtcaattcaaatggcagtgttttaataaacgcctttagtcggtcattgtcataagcgatcgcaataccgttggtcgtcgcgtccgtttgcttcagaacttgcatttgcatttgaaacaacaagaactcctcgtaggtcgctgagcgtcgagcggccgttgaatcggcttgactagctgggaagtgcatatcatgaatcatttggcgccgcggtaacagtcggtatttagcacgtaagttagcaggcacaatgtccgtaatgactggggcatataactcatatgcttgtttgatcatcttctgaatcgtcccctgcttgaccgtcttgctggccggataaatcgaaccaaacgctgaatccgcattattgggattgatgatcttcattcccgtcaagctactgcgcgtggcgtcccacttgccataaacggctaaatcttggccagtctcaatctgtttcatcaagtatggttgattaaaaaaagtcaccatatagacgtcatggtcgattaacaagcgaaaattcaggcgattcttcttacggccaaaccgtgctagcacaggttcagaagccacagtaccctttagtgtcaccttttcttgatcggcgatttcattgacgtctttgacctgtagatcttcatagcgaaagggataataggtcaatagatctgcaatcgtattaatcccaagctccgctaaacctttttggcgggctgggccgacaccacttaaagttgcaaccgcgtcactcaactgttgtcccatgcctgaccaccgccctttctaaaataattgcctttaccaatattaattataccaaaaaaacgtttcaatcccgcgggaagtatccgtccgtacaaaaacaggccccagcatcactgctaagccctatttttaacggttagtcctattcaactgacacaaggaatgggtaaactggttgatcaccttcatgaatttcaatttctaattcatcatccaactcttgcaccttagctgccaaatgatcagcgtcagttttagttgcatccttgccgtaaataatcgttacgagttcgctatcttcgtcgagcatggctttgaccatatccaaagcagcggtatcgcgatctggattcgtaattacgattttgccatcaactaagcccatgtaatcatctttcttgatttcaaggccatcaatcgtcgtgtcgcgaacagcatgtgtgacttgaccactaacaaccgtactcaaggtttcttccatcgcggcctgattatcgtctaaatcagcttcagcattgaatgccaacattgcagtcatgccttgcgaaatcgtctgactgtggataattttaactgggacatcggcaacttccgcagcttgttcagctgccaaaaagatgtttttgttgtttggcaatactaatgcttgttgggcaccactgtcattaacagctttgacgatatccgcggtacttggattcattgtttgaccaccagcaatgatgtcggtgacacccaagcccttaaatagcttgccgatcccatcacccgatgacacagagatgatcgcataaccatgcatgtcaacttgtggttgtgaaggtaaggcgggctcagcagcggcttgcgcttcgtcttccttatcatgttccatgatggtttcttgttgtagacgcatattatcaactttaactttgatcaacgccccaaaacgttggccccacgtcatgacatcgccaggatgttccgtatgaacgtgcaccttaacgatttcatcatcgttgatgacaagtaatgaatcgcccaatcttgctaagtactcatagaaagtgtcatagtcgaacttgtgatcaactaacttaccatcgccgattcgcaccataatttcggtacagtagccatacttgatatcattcgggtctaattgcccctgcacactttgatggtgggcagcatcaatcatcgaatccatttcagcatcgtccggaacatagtcctgtgattcgtcgaccttgccgcttaatgagtcactaaaggcttccagcacgaaggtcagcccctgaccaccggaatcaacaaccccaacttgttttaaaacggataacaagtccggcgtggacttcaatgcagcttcagcagccgtaacgacggcatccataacttcacaaatatcatcggtcgttttaacagcttccttaccggcaccagcagctttgcggatgacagtgaggatagttccttcagtcggcttcataacggccttgtaggcggtctgagcaccggctgcgagggcggctgctaaatcgttagcggttaagctctccttatccgctacggctttagaaaagccccgaaaaatttgtgatagaatcacaccagaattaccacgggcccccatcaagagtcccttggctaaggctgacgctaggtcgcctacttttgtactggtttcttcacgttcatatttggcaccgctggccatcgataagctcatattagtcccggtatcaccatctggtaccggaaagacgttcaaagaattaataaattcagcacgttggttcagcttttgtgaagcagcctgcaccattttgccaaattcaagattagtaatcgtggtgattttcaatttcaaaattcctccttggcttccaccaacatcaatttagtcgttcattacccggacaccttggacaatgacgttgaccgaattggccgtaacgccaagcatgttttgtaagttatatttgaccttggcttggacattgcgtgagacttctgaaattttggtcccataactgacgataatgttgacatcaatagccaccccattatcctcttggcgaacaaccacaccgcgcgcatagttttcgcggcgtaaaatttcattaacattatcacgaatctggttccgactcgccataccgacaaccccgtagttatccgttgcggcgccaccgacgaccgtcgcgataacatcattatcaatatcaatggttccaaattgcgttttgattttgacagccatgaaaatagcctccttgttttaacgcgttcatttacgatagtttatcatagcacaaccactcttgaaagaaaaattaagcgactgcttaacagaagcccggaaactgggaatttagcagtaaagtaaaattacttgatagaaatgtattgcaacctttattaatctatgataaattattctagtgaatgataaagacgaccttttatcaatgaattaccgaaggaggcagatcaacatggcaaaagactacgttacaggcaaacggacgcactttggtaacacgcgttctcacgctttaaaccacagccgccgcagctggaaagctaacttgcaaaaagttcgcattttagttgatggtaaaccaaagaaggtttgggtttcagctcggactttgaaatcaggtaaagttacgcgcgtttagcgcagcaaatcgccagcacattttttgtggctggcgttttttgttgtctaaaattactaatttctcgtcaactttttataaagtttataattcagccttgaccagcccattatgatgacctgaatcattgaggatgcttgccgtaccatcgtcggaaacaaccagctgggtctgaccaaaaagttctgcttcaacataagctttccggttaggtctactaacgaccaccgacctaaacatcagcacgtttcaccaacaagctccccgatgatacgtcgttactgcatattaaaagaccggttgatgagtttatgactcaccgaccggtcttattttagctgaaaccttggggtaccctacgcatctgccatgctgtcatcacgactttgaataacagctagaacccccgcatcaaagctaaagtgaccagtattgccactgaattcgttactggcccatgaaatcgggtacgcattataagcagcgtccaactgatacttttcatcgggtaacgtgagatgcatcggcatcagcggtacaaacgccaaatagcgtttatccgcttccttcgtgatctggtagtcccctggtagaaagaaccgaaccgaattttgcttatcaatcagtttgatctgcggagcccactgacgaaataccggatcaagtactaaccacatattggccagtaaatggtctaaccgaccacccgtggcaccatatagatgcacttcatccggttgcaactgctcgaaaatggatttaatcgccaattgtgtatccgtatggtcttggtcgggtttgacaacgatagcgcccaccaacgcatctttgacagtctggagttcagccgcatcaattgaatcaaaatcacctacgaccatcacgggctggataccacgtttcaccaaacgcaacgcgccacggtcagcgccgacccatggtcctggaatcgtcgttaaatctgctggataattagcagtcggtccgccaaccagtaagtttacgatggttgccattaattggtcgccaccttcaaatcttgaatacgttgcgctgggtccgcactgtcatagacatacgaaccagcaacagcgaccgtagcaccagcgtcatagcacgccttgacggtctggtcgttgattccaccatcaacttcaatctcaaattgataaccgtgttgttgcttcaattcgttcaacgccgcaattttagcaaccatctggtccagaaaatgttgaccaccaaagccaggattgacggtcataatcaaaacttgatccactagtggcaataattcactaatcatgccgagtggtgttccggggttcacgaccacttcggctttcacaccagcatctttgattaattgtaaggcgtgataaatgtgacgggtactttcaacgtgcacaccaatcaaatctgcaccggcctttgcaaactgcccaacaaaccgctctgggtccataatcattaaatgacaatctaacattaatgacgttactggccgtaaatccgccacagtactcattccgaatgacaagttggggacaaactgaccatccatcacgtcaatatgcaacgcatcggcaccggcattttcagccatctgaacgtcacgttgaaggttcgcaaaatctgcacttaaaattgaaggggcaactttaatcattagtctcactcactttttcttattatagattacttttttatttttaatggtttcatagaattgtaaataattatcatagcgactcgctaacagctccccagctgccaatgcctgtttaaccgcacattgcggttcgttaatatgcacacagcctcggtatttgcaatcagcgctaagtcgcacaaactctggaaaataatgggtcaactcgttagcggcaatatcgaaaacttcataggatgagaaacccggcgtatcagcgaccaacccatccgcaatcgggatcaagctgactttacgggtcgtatgtttcccacgattcagcgcctgcgagatttcaccagtcgctaacgccagccctggttgtaaatgatttagcagtgttgacttaccagcaccagtttggcccatgacaaccgccacatgaccagccagagccgttttaactgcggctaaggcggccggtgaaaatgcggttcgttcgcagatgacctggtaaccaatctgccgataagcgtccgctaatgttaatcgttgttggtacacctcatcggttagtaaatcagtcttcgcaaagtagagtaatggttcaatacctgccactgccaaagctaccagttgtcgatccaataaattcgttgaaaattcttgttccgttgtagcggttaccacgatacctaaatcaacattagccactggcggccgtaccaactgggtctgtcgatcaagaatatttaacacgtagccctcttgtggggtcgccgcatcaaactccacattgtcgccgacaagtggcgtaatgcgccgcttccggaaattcccgcgtgcacgggtccgatacatttggccatcagcataaacgtcataaaagccgcttagcgattgccgaatttgtccaattttcaaattagcaccaccttttatattatttggtacggtccacttttctctattgtaccaaaaaagtcatgcattgcgcatgacttatctttattttgttgcatttttgcttgtaatattcttcttttccatgatcgtaaccccgttacgcacgattcggtaatgccccttcgtattaccggtcagctgaaacggtaaactaatcttagtcgaccgcatgattgcaatatcgcgataaacggtctcaatcatatgggtatcatcatacaaataaatcttaacatcgttggcctgggcagtggtggccgataacgctttgtatggcaccgttagtttaacataaaaattctgtggtgtcgtcacgttattatcactgccccttgacatggtcaccgtaatagtcgacccagtccggacattgccaccgccatctggatcttgatcataggaataacctgccttctgttccgaagagtagccctgcttaaagttaacattaagatcatttgcctcagcatagtccagaatatcgctcttgctctcaccagttaaatcttttagctcgacgtagcggctaccagcgctgaccgtaaacgtcaccgtcgtatctgtcggcatcacgcgactaccagcgacaacatcctgactgatgatttgtcctgctgcaaccgacgacgtactgtaagtttccttaactttgaaccccgccgatttaagcgtctgtcgaacatcatggtaattatcattgacataattaccaaagctcataaccttggcaccgttgctgataaccaaattaatgcgagcacgttcttggacccgcgtcttaacactgggcgttgatttgatcacctgatttttggctacctgattacttttagcatgttgaacagttccgaccgtgagatggtgttttttgaggaccttagttgcggcacgctgacttaagcccgttactttcggcaccgtcgtcatctgtggccgacttaattccaaaccgacgatcacggccacgactaataacaaaataataccgccccaaaagaggagccgacgccgcaacggatgtcgtttggaccaagaacgtgttggtaacggttcttcatcagcatctgtctgactctcagtcgtttcagccgggcgctggagtgttggttgcttgcttttatgcgccacgacctgggtcttaccgtcttgattggccgcaattgctgcttgaatatccgcactgggcatgatcttagtctcatcattaccgacatcttgcggtacaaagcgcttttcgcccgcacggctactagcaagcaccgtcaataagtcagtggccatgtcctcgaccgtagcataacgttcccgtggatctttcgttgtcgcctgcaagacgacgttttcaagtgcctgcggaatatccgcatcaaactctcgcacggatggcattgcattttgaaaatgctttaacgcaatggaaactgccgtctcacccttgaaaggaactgagcctgttaacatctcatataaaataatccctaacgaatagatatccgattgttttgtcgccatgctaccgcgggcctgttccggtgacaaataatggaccgaacctaaaatcgtgttagtctgcgtcatggtatgttcagataacgcaaccgcaataccgaaatcagtgattttagcattgccctgctcatcaattaaaatattttgtggttttaaatcccgatgaataatattatgcgcgtgggccgttgccacggcacttaatatctgctccatgatgtcgattacttgctgtaacggtaacggaaagttctctttaatataatttttaagatccatccctttgacgtattccatgaccaagtattgcatgccattttcttcgccaatatcgtacaaactgacaatgtgggggtgaacaagttccgtcgttgccagtgcctcacgttggaatcgcttgatggtcttaggatcatcacgtaagtctaaccggagcagtttgaccgcaacatcacgatctaatattaagtcatgtgccaagtaaacgttggccatcccaccttcacctaaggaccgaacgatccgatatcgtccgctaagggtatagttgggtgtcatttactggccacctcaccatcaagcgccatcagcagcgccgtaatgttgtccttaccaccagctgcattggctaatttgatcaacgtctcacacttctgggtcgaagtctgcgtcgttgccaaaaccgtcgcaagctgttggtcagtcaccatattcgtcagcccatctgaacataataacaattggtccccaggttgtatctggtaaaggttcgtatcgatatccgcatctggtgagatgcctagtgtccgcgtaataatatttttctgcggatgttgtcgggcctgttcggctgaaatctctcctcgcttgaccaactcattgactaaagaatgatcctccgtcagttggtggagttgcccatcgcgaaaaagatagccccgactatcaccaatgttagccatcaaaaacttttgatcaaaaagcaaagcggcgaccattgtcgtacccatgccgtttagatctgaaaattcacgggccttttcaataatatgctgattttcatcttgaacttcacttgctagccacttgacggcatcattgggttccttgaatgttgtattttcaaaccgaaaacccatgtgcgagactgccatctcggaagcgacatcgcccccctggtggccaccaataccgtccgcaacaattgcaaaattgatgcccgctttattttgaaaaaagccgacatagtcctcattttcttcacgttgttggccaatatccgaccggtatgcaaaatccattgtttaccactccaccattatttttttcgcaaacaagcaatgaaaaagccgtcggataaataatcatcgggataaatcgacaaagtcttttccgttcgatcagttttcaagtctcgttcagttggcgttgtttgcaactcaaaatctgggtgatccgctaagaatttggtaatcacatcctgattttcctgttgcaaaatcgtgcacgtactatacgtcatgataccaccttttttcaaggttggggcgactgctgtcaaaattgccagttgaattcgttgcaagttcaaactatcctgcaactgtttctcatagcgaatctcaggcttccggcgcatcaatcccagtcccgaacacggagcatcgactaaaattcgatcaaaactttcagcattaaactgcgtctcaactttacgagcatcgagttcggtggcttcaacgcgatcagcaacgtgcatgcgcgccgcattttggccgatcagtttcactttattagcatgaatatcaagggcaacgactgtgccaccctgctcagcatctaaactagccgcaatctgggtcgtcttgcccccgggggccgcacaagcatccaagactcgatcactcggctgcagattgagtgctggcacaactaattgtgcactttcatcttgaactgtaaacatgccataccgcatcgcttcagtattaatagcctgaccatccgttgcaatcagccctaacggtgagatttcactcggcgtaattgtcaaaccatcattaatcagcaccgttgtcacatcttcaaccgtcgacagggccgggttgacacgtaaggcttgcttagctggttggttcaatgatgataagattcgctccatcttttcagcacctaattgacgccgcaattcttgaatcaaccatattggcatgctataagtcacactcaaccgttcatcaggatccttaatcgcatcaaaactcggtaatcctgagcgatccatttgatgtaagacgccggttacaaaccgccgaatgccagggtgacctttgaccttagcaatttcaatcgtttcgttgaaaacggcccgttgtggaatcttatccagatactgccattgatacaatgcgctcaataagagttcccgtacccaggggtcaatctggtgcggatgtcgaacaaacggggtcaaccagtattcgagagtcaaccgatgttgaatgacaccgtaaaccatatttgtcagcagattaatgtcacgccgatccatctgatgatcattgattaactggtttaattgcaaatttgaatatgcaccgttcttaatcttcgctaaggcggcgaccgctaaccagcggggggtattaccaactgtactcatttattaataacctgctctccggtagcgaacttatctgccgcaccatttaaatagtctgtaattgtcatcttcggtttaccagctggctgcaacagattgattgcaatcgctgtgtggttagcagctgcaatcacaagctcatgtttcgtcttgcgaaccacttgtccaggagcttgcgtgaccacttcgtcagctaacggggtcacatcccagaacttcgtgcgcttcccatccaagaccgcataggcgattggtgctggccgcataccccgaacttgattatcaatttcaacggccgtttttgtaaagaagtctaagacctcttgttctggctgaatgttcggtgcaaaggtcacttgggattcatcctgtggcaccgccgtaatttcgccagcaatcaacttgggcaatgtttccagtaacaagtcgcgaccaactaagctcaacttatcaaacatcgtcccggtgtcatcgtttttttcaattggaatcgcacgctgcgccagcatatcgcccgcatccatctttttaaccatgtaaatgatagtaattccagtttcagactcaccgttgataattgaatattgaacaggcgcaccaccacgatacttaggcaacaacgagccatggacattaacggcaccaattttggcagctttcaacaattttgttggtaaaaactgtccaaaggcggccgtcacaattaaatcgggctgcaagtcaataatctgttgcatttcaggactaccactaatctttttcggttggaagacgggaatatcatgggcaaccgcgacttctttgactggcgaagctgttaagacgtgtttgcgaccaacttttcggtctggctgggtcacaacgcctagtacctggtattgttctttaattaaacttttgagaatcggtgccgcaaacgcaggcgttcccataaaaacgattgatgtcattgtcaaacttcctcctaatcccattacatgaaatgtaagggttctacgtcaatgccaatctgtagcccttgtcgttgttgcgcctgcgtctcatgcagtagcgttgtcagcgtctgagctaaattgggttcttgtttatatttaatcacgatttgataataataacggcgattgactcgtgcgattggcttgggcgttggacctaatagaatcgttgacggtgccaaccgcgggcgtaaccattgcaataactgatacatgcgcttggccgctaccccttcatctaagtcactcgctgtaatttgaaccgtaaagtagtacggcggatagccaccccggtgccgcatctgcatctcatacttgaaaaagccttcgtaatcgtggtgttgtgcaaaccgaatcgcataatgatccggattaaatgtctggatatacacgtgaccactcttttccgcccgtccagctcgaccactcacctgggttaatagttggaaggtccgttcactggcgcgaaaatctggcaatcctagggccgtatcagcattcaagacaccgaccaaggtcacgttaggaaaatccagtcccttcgcaatcatctgggtaccaatcaaaatatcagcttcaccactcccaaactgtgctaaaagcttggcatgggcgccctttttacgggtcgtatcattgtccatccgaataatgttagcgtccggaagcaagtcttgcaattcttcttcgactttttcagttcccgtcccataataacggatctgacgactatgacagttcggacaattccgcggaatggcttcttcgtgaccgcagtaatggcacttcatcgtgtgcgtatccatgtgtagcgtgagtgaaatatcacaattaggacacttcaagacaaaaccacaatctcggcacaacacaaacgatgaatagccccgccgattgagcattagaacactctgctcatgacgttcaagccgatcctgcaaggcaactaacagtggcgctgagaaattgctttcagcgtgttgttgcatttcctttttcatatcaataattgaaaccttaggaaggggccgtcgattgacccgatccgcaagcagtaagcgctgataaacgcccttttctgcgcgggcgcgcgtttctaacgatggggtcgccgaacccagtacgactggacagttatggtaacgactacgccataaagccacttgccgagcatgataacgcggggcatcatcctgcttatacgtgctctcatgttcttcatccatcacgattaagccaagattttttagcggggcaaacaccgctgagcgtgcgccaaccaccacctgagcctcacctcgttggattcgccgccactcatcatacttctcaccactggacaatccactgtgcaaaacggcaacagctttaccaaagcgacccttcacgcgttgaaccatttggggtgtcagtgaaatctccggcactaacatcaacgccgtttttccttgtgccaatgcggccgccatcgattgcaagtacacctcagtcttaccgctccccgtcacaccctctaacaagaacgtggtggttgcggcttggtcaacggcttgcgtaatctgatcgacggccacttgctgttcatcattcaattgtaacgccttggtagtcttaatatcactagttgcgtagggatcacgataaacctcgacggccacttttttaagccagcctttctgtactgctgtacgaatggcaccgtccgtgacatcaaaacgagtacaaaacgccttttgcgagagctgttcaccatttaaagtgagcaacccctggagcaccgccaattgttgtgtagccccggcgcgtacctggtccactgcagcctgtagcgcttcgttagttaaggccgctttcaccgccgtttgcgttttacgccgtgcttgatttttaacttggtagtacacatcgacttgcccagccgcctgcagccgtaataactggctgacgattgccggcgtcgtggcgacgtcatcaaacggcaccatcgattggtccccaaacagcgtcgttcgaatcgtcgcgggcgttgttgctgttgttcgcaactgtttttcatactttgcacgcatgaccgccggcagcagggtctgtgcacaggtaatctgaaatgaaaacgtgctggcagccaaccacttggtcagtgctaaggcttcagtattcagaaccggtgctaggtcaacgaccgcgtcgattggtttcagctcaccatcaaagttagtaacgtcatcaagagctaacacaaacccctgcacccgccgtttaccacggccgaatggcaccacgacgcgcatgccgggttgcacttgtgattgccaggcggttggaattcgataactataaggtcgatttgtctgcatagtgggcacatcgactaatacttgggcaatttgtgccacacaactcttcctctctacttaatcatgcctgtgttcctgcaccatccgcaattgccgtcatcaagatctgtttggcaattgcagttttcgttgtcaattccgtcgtaactggttgttgctcaggccgcaacagtgtgacctgattagtatcaccattgaacccaactcccggtttggaaacatcgttagcaacaattaaatctaattttttactagttaacttacgattggcattagccagcaatgattgcgtttcagctgcaaaaccaatcacatactgttggtgcttccgggccgctaacgtttttaaaatatccggtgtttctgtcaatcgtaacgttaagtcagcatggtcagctggctttttaatcttctgatcagctaattcagccggccgataatcagatacggccgccgccatgaccaagatatccgtatcatcaaaaatatcactgactgccgtcaataaggattgagccgaatcaaccgtcacgaccttaacaccactaggcgctgctaaatgagtcgtggcgctgatcagtgtcacagttgcacctaactcccgtgcgacttgagcaactgcgtagcccatcttccccgatgaacgattcgtgataaatcgtaccggatctaaggcttctcgggttccgccggcagtgacgacaactcgccgtcctgctaatggcaaatcaggtgtcaactgaatcagttgatctgtcaaccaggccaaaatcaccgctggttccggcaagcgtccttgaccactgtagccttccgccaacatacccgtagcaggagttaagacgtgtaacccatccgtcgtcagttgcttcaaattgcgctgagttgctggattagcgtacatatgtgaattcattgctggcaccacaaacttgggtgcggtcgtcgctaaaattgtcgtcgttgcggcatcatcggctagaccattagccaccttagcaatcaagttggcggtagccggaacgagaatcatcacttcagtccagtcagctaacgcgacgtggacgacgtgatgcgggtcagtcgttgtgaattcatcaatgaccactggctgctgcgttaaagtttgaaaggtcaatggcgtgataaactttgccgcatgggttgtcatcgcaactcgcacgacggcgccctgtttcatcaaactacgaatcaatactaacgctttataactcgcaatcccaccactaacgactaccgttacatggcgttttgtccatatactcacttcttcacgtcctttgaaaaatctcgcaaccgtgccagcgagatttttacactttaataaaacaattgtatcaagaatcgacagtaacgtgaagctgaacgtccgcgtcattcttcataaaaaaagtgccaagccccagctggctcagcacaccgttttgttactaatctttgtcagtttcatctggatcgatcattaagtcaccggccgcaatttcttccatggcccgaccaatcgttttaaccgatttgtattcgctaagcattggtgctgcaccagcgtccaattcatgggcccgcttgctagctaacataatcaatgagtaacgcgaattaacttgcttcaataagtcatcaactgatggatataagatcatgattccgcatctcctaacatttcttcatactcgggcatgacccgtttaacactaaaccgttcactacgaataatagccttgattcgttcagcagctagcgggacttcatcattgataaccgcataatcataattacgcatcatcttgatttcatcaaccgcttttgccatccgcttgttgatcacactcatatcatcagtcccacgaccaatgatgcggtgcttcaattctatcaaatccggcggcgtcaagaaaatgaagacgccatcaggcattttttcgcggacttgcatggccccgttaacttcaatttctaagaaaacgtctttgccagccgccaacgactgcttaatatattttaagggcgtcccatagtaattgtcaacatacttggcatattcaagcataccgccgctcttaatttcatcctcgaactcttctttggacacaaaatagtagtccttgccatctacttcgcccggacgcatttgccgcgtcgtcatcgagactgaatattgaaaatcgttatcatctgagtcaaagatttccttgcggacggtacctttaccgacacccgaaggacctgataagacgattaacatgccttgtttcgccatgatcacaaattccccttaattaaaatatgttttaaagtttattttgcactttttaaccctatattgcaagtattatcaaggttacacagctttttttcatttttattcgtgaattttctcaaattttaggcttgctttttagaacgcctgttcgtataatggaaacacaaacaaatgttcgaggtggctaatatgcaaaatcaacaatctaatttgaaactaatttccaagaacttacacgcttcctatcgccaatttatggatgactttactgctgccccgaccgtcgttgcgccgttactgccaatgatgccggctttccagcgggatttgttcttagctcaagcgcacacggaacactatcaaatcatgctccagatgcagcctcagctcactgagtcccgaccatataatattcacggagtgttaaaaaccctcgctagtggtcagttggttctagttaatcggcagttacacctgacccacttggtcgacccggacgccatccgttatatcaaacgcgtttagtttaatcattaatacttgcatcaaaagatgaaatcatgttcaatacaaccttgcgtattctcatggtgtttttgatgcaaatcaaaaagattgatgttacagctccactgacttccctgaatgagtgagtacggagtacctgtaaatcaatcttttttagtaacttaatttttatattgcttcttttacttgtcgctcactgacgttatttttgagttggatcagcacgcttttcaatccaagccaagaccgtatcagcaatgattgccattaaggctgttggtaacgccccggccaagataatggcaccaccattcgtagcattggttcctcgaataatgatatcccctaaaccgccggcaccaacgaaagtcccaatggccgtaatcccgatagccaacactaatgcgttccgaagtccagccataatgacggaaagtgacagtggcaactccaccattcgtaacaattgccaacgtgtcatccccatccccttaccggaatccaaaatactagcactcacattttgcattccagtataggtattcttgataatcggtagcaatgcgtataaaaagaccgtgacgattaccgtgttcacacctaagcccaagccaatcatgatgattgataacatcgctagtgacggaatcgtttgaatcacattggcaatcgcgatcactgtcgcactcaaccgactatgatgggcaatgaaaatgccaattggaatcccaacaattgccgcaaacagcacgccataaattgaaatcaagaagtgacgtgagaactggcttaacacgtacacaccgttttgttggtaataatatatcaactgttgcagtaagttcatctgagccattatttgtcactcccttcaaagtaattatgtttttcaaggaactgtttagccacaacttccggttccactaagttattatcaacttgatagttcaagttttgcatcgtctttaagctgattttaccgtttaatcgattcaagattggcttcaacttcggatgagctttcaagatcttgttcgttgcaaccgcactcgcattgtatggtgggaagaaattcttatcatcctttaaaatcttcagatcataactaccaatccgaccatcagtcgagtatccgaggatggcatccattttacctgattccaaggcatcataaactaaaccaatttgcattggataagtcttcccaaattgaaagccatacaacttcttaaaggcaggatagccgtcaccttttcgttcagtccagatttgatccaaaccgaccgtcagcttcgaggctacttttttcatatcactaaccgtatttagatggtattttttggccgtcgctttcgtcaccataaaagcataggtatctgcgaacccataacttgggaaataggtcatttgatacttgctgttgaactgtgagcgaactttttggtcaatcgacttgatattactccgatccatcttttcacccagaatcgtcgttaagtccgtcccagtgtaacgaatcgctgaaatatcagcctgatcattcttcaaagcattgaaactaaccgtcccagaacctaaattgttaatgattgtcgtattcaaattagaataatgcttaatcatatcttgaatcatgtacgccatgatctgttgttcagtcgtgttttgtgacgcaatccggatcgtatcggatgaagttcctgacaaacccggaaagccacagccggccaataataacgcactggcgaccgttgcgaaaacacctaacaaccactttttaattttcttcatctttaatcccccttacgcttgtgtggttcttggggtaaccgctgcttctagtttacccaacagccaatcaacgatgagggctaagataatcactggaatcgaaccgcctaaaatcaagtcagttcgatagaggtttaacccattaaagataaagtccccaaggccaccggcaccaatgtatgatgctaacgcggcccaggcaataacgtacgttgcggataatcgaataccagccataataactggggctgccatcggtaactcaactttaacaattgactgccaaccggtcattcccattcccttagccgcatcgatcaaggccggatcaacgtcttccagtccaagataggtattgcggagaatcggtaataaagaatagatgaacagcgcaatgatagctggaattgcaccaatcccgaaaaacgggatcatcaatgccaacaacgccatcgctgggatcgtttgtaacatactagcgattgacatgaccacattcgcaatcggcttcacccgcgtaagcagaattccaatcggaaccgctacgataatgcctaagaacaatgaaaacgctgaaatatacaagtgttgccacgtcttaaccagcagctgcatgccgtagttttgtaggaaagttatcatgcctgttcaccgccttcagcgggcgcatcgtcctccccatgatgaatattattttcagcttcatcttcgtcttcatcaccccagagagcatcataaacaatatcgaccagggtggcccgcgttacaattccgaccaggcgatgttgttcatctacgactggaatgttcttcaagccgcgtttcaaaatacgttcgaccgtatcccgaatcaatgaatttgactgaacatagaacaaatcagtcttcataatgtcgcccacactagtagccgagttaaagttgtaatcaacgtcttcaatgccgatcacacccttcaagatgccggcttcatcggtgactaacaacgagtcaacgcgtttatcatgcatttgtcgtaatgcgaccgtcaatgactttcctggtgtggtggcaattgggtctttcaacatcacttgcccaacagtggtaatacttggccgtgcttgaatcaaacgatccttaccaattaagttctcaacgaattcattagctggatgacgtaagataccgtctggcgtatccacttgcataatgtcgccaccatccatgattacgattcgggtcgctaattttaacgcctcatccatatcatgggttacaaagacgaacgtcttacctaagcgttcctgcaaatccttaacgagatcttgcaaagattcacgggtaatcgggtctaacgccccaaatggttcatccatcaatactaaatcttggtctgctgctaacgcccgaacaaccccgatccgttgttgttgcccaccggaaagctccgacgggtaccgatccaagtaatcttctggcaattccaccagtttgatcatcttcttagcacgttcattcattttatcttggggccactttagcaatcgtggtaccaaagtgatattgtctcgaatcgtcatatggggcattagcccaatattttgaatcacataaccgatttgtcgccgtaatttaaccgggtcaatctggctaatatccttaccattaagtttaatggtaccggaagtctgacttaacatccgattaatcatccgcatcgtggtcgttttacctgaaccagacgtcccgataaaacaaacaaattcacctttttcgatttccaaattaaaatcttcaacggctactttgccaccaggatacgttttattcaaatgttccattgtcagaaacaacctcatcactccaatcatttactcagtttatttcgttgccgaataaactgtactgtaattaagcataacttataacgaaagcaaaatgcaaacgtcatgacatgtaaactgaacattttatcgttttaacggtatattttggtagtcggagcttcagattagccacccactaccaaccagcccgacagttcattaaaacgtgtccgttgacccatatttcgtctatttgcgttttatattgtaaagaattatcgtcgccttggcaataataccgaaacctcactcgacactatcgtcactaattaacaccatcaaaaaaggaccgaccatagttgtccgtcccttgtggtaccgatcaattaagcctaatcgtctttttcctcatcggccagtcgcaataactcttccgcatgctcaagcgataacttagtgactttagttcccgccaacatgcgtgccagttcttgaacccgggccgcattatccagcttagtcacactcgttttcgtgcgtttaccagtaatcttcttggcaatgaagtagtggtgatcactcatcgccgcaacctgtggcaaatgggtaatacagagcacttgtgaaaagtgtgcaatgccgttgattttctcagcaatcgcttgagcaacccgaccgctaacgcccgtatcaacttcgtcaaaaatgatactggtaattccctgtgattcagaaaaaatggttttcaaagccagcatcatccgtgagagttccccaccagacgcaattttagccaatgggcgcatgcgctcaccaggattagtctgaatataaaattcaacactgtccagaccactccgatagatctgacccttagtcggtttgaatcgtacttcaaagattgccttatccatatacaaatctttgagttcttgatgaatctgtcgttgtaacactttcgccgcagcccgccgtttatcggacaacgcttcgcctgtcgtaagtagttgttgtttcagatcggcgacccgctgggccagatcttcactattttcttcagagtcagtcatcttggctaactcagccgcgattttttggtaataatctaagatttgttgttcagagtccccatacttacgttttaactgggccaaaacgtccagccgctgttcgatttcatccaagcgaccctcgtcgaattcttgcaaatcgagctgattagaaatctgaccggccgcgtcctgcagcccataaaaggcattcttgacattcacggtaatctcattaaaggcggggtccaaattagcaatcggttctagtgcattcatcgccgtaccgaccatatcaaccgcaccagtcgtctcctcacctgcagctaacaatgtgtaactctgttgaagcgcttgattgatcatttggtaattatccaagcggtcacgttccgcagtcaaactggcctcttcacccactttgacttgtgctgctgcgatttcgtccacttgaaagttcagcatatctaagcgttgagcccactctttttcattcgcattcttttgccgcagttcacggtttaactgctgataacgatcatactgttgctggtaacgctgcttcaatttacgaattttagcggtggcaaactcgtccagcaatcccaggtgtttttcaggttgcatcaactcttgatgttcattctgaccatgaatatcaacaattgtttcaccaatctgtttcaaagtcgtcgtattgaccagcataccattgatgcgacatgtattacggccacttttagtaatctcgcgctgtagaatgacggtattatccgcatgttcgatccccgcttcgtccaacaattgggccgtcacgccgtcagccggcaaaataaacatgccttgcaaaacggctttatcagcaccggtccgaataaactctgccgagccgcggccacccgctaataaaccgactgcatcaataataattgacttaccagcaccggtctcaccagttaaaaccgtcatgccggcttcaaaagcaatgtctaagtgttcgataattgcaaagttcgtaattgataattcttgtaacactgcaagccctccttaaaagcaattggttaccagcatccgttagttaattttgaaaaaaagcgacctgacacacatgtgagcaggtcgaagatagcttactaattagtgatcactcagtaagcgttgaattttttgttgtagctctaaagtcatcgctaacgacttgcaaataatcagaacatgagcatcatcgcctagcgttccaaaaatttcgtcataatgcattgcttcaatcaacgttgctagtgctggtccgttacccggcaacaccttgatgaggacaaatttatcctgagtcgcatacgagacataagcatctttcagtgtccgcttgagctttttctccgtatccatttgtttctgaactggcatactatagtggtaaccgcccgttgccgagggaaccttgaccagctgcatatctttaatatcgcgcgaaatggttgcctgtgtcacgtcaatatcttcagcacgtaacagcttgacaaagtcttcttgacgttcaatttcgttcgaactcaataatcgtttaatgtagcgttggcgctcttgcttcttcacccgatcacccccggtagctattcatacttatttaaacacatcataagccaaaatgcataaatatgaaagtccggatttcaattttaagcttgatttaattgttcataagcggccgcctgagttttttcaatcgacacagtcggcgcaatccgtggtgtttcatcggtagcttgtaaatgaattagaaactcaatattaccttcaccacccttgattggtgaataatcaagccctagaacgttataaccattcgcttgcgcaaattccacgatatctgtcaacaccgcctgatgaacagcaggatcacggacaattccgtgtttgccgacattctcacggccagcctcaaattgtggcttgattagagcaacgactgaaccaccgttttcaataatcgcgtgtaatgggggcaaaattaagtgtagtgaaataaatgaaacgtcgatggacgcgaagttaggttgcccctgcgtgaaatctgccagttcactataccgaaagttagtatgttccatcacaaccacgcgcggatcttggcgtaacttccagaccaactgattactaccgacatccaaggcgtaactcatttttgccccattttgtaaaaccacgtcggtaaaaccaccagtcgacgagccaatatctaggaccgttttgtcggtcacgtcaatttcaaaacttttgagtgctttttcaagtttgagaccgccacgtgaaacgtagggcatcggtttgcctttcaaatgtaattcagttgccactgggatcttcatgcccggcttatctaagcgttcttcgttgacacctaagatttcaccggccattacggcacgcttagccttttcgcgggtatcaaataatccttgttgtactaataatacgtcaactcgttctttttccatctaaatttaagtccttaatctgtaaaatacgttagaaaagctgcaagcaagcccatgcctcgttgactagcagtactagcttttactaacgccgtttgagcagctgttaccgcttgttctaacgctgttcgtgcgcctgcaagccccagcaaacctggatacgtattcttatgctcatcggcatccttatgcgtagcttttcctaactgagcaggcgtactcgtcacgtctaaaatatcatcgtaaatttgaaacgccaatccataggcatcagcatattgtaatagcaattcctgcacggttggttgcacttgagcttgaatcaaccctgcctggacagcgtagtgaattaacgcccccgtcttctcgcgatgcagctgttgtaaggctggcaaagccagatgttgtcccgctccaaggacatcagcaacttgaccagccaccatcccgcgaggtccggtggcctgcgctaatgctaaggtttgattagcgacgatcgatgccggtaacccactatccgcaatccattcgaaagtcaacggttgtaaagcatcccctgcaagaatggcaacgtcttccccaaacttaacatggttagtcggttcgccacgtcgtagctgatcattatccatcgccggtaaatcatcgtgaattagcgaataagtatgcatcaactcaacggccacacttgcccgcaagtttgcagccgtcgttgtgatatcaaaagtatctaaaatggctaacgtcaataacggccgtaaccgtttgccacctgctagtaccgaataacgcatggcgtcagtcagggttgattggtcagaacacgcttgaagctgctcatctaaatactgattaatctgaggacgccacttggattcaaattcagttaataattgcttattcattggcgtcagcttgctcaaatggaacttcgtcgccattttcattcatcatcttagtgagcgtcttttcagcaccttcaagggttgcttgcaactgcttgctaagtgccacgcccttttgaaattgatccaaggcttgttctaaagggacatcgccttgttctaattgattaacgatcgtctctaattgtgataaattctgttcaaaagttggttgttcagccattattttcctccatcaatcttcgtaatctgtgcctgagcctcaccatcagccatgtgaattgcaaccgtttgttctggctgcaattgtttgaccccgtgaaccacctgttcatccgccgtcacaaaggcgtaaccacgcgtcatgattttaagcggactaagtagatccaacgattggacggtctgcgtcagttgttgccgtttttgccgcacgactaactgggtaccccgattcagccgttgctgcaagttaagcagttgcgtttgtgcctggcgaacttggtgaatcggcgtttgctgtcgtaattgttgaaaaacacgctggtagtgctggcttgccagattaaagttattttgaccagcctgtttaagtcgctcatttaagaagtctaacttctgcaaatacccttcgtacaagcggttcggctgagtaaacacgtacgacgtttgtaatttattaagtcgttgtcgatcgcgttgaacgaaattctgaaatgcattgaacacgcgggtctggtcttgctttaattgtaataaaacatcgttatatactggtaccgctaattcggcagccgcagttggggtggccgcccgcacatctgcgaccaagtcagcaattgtcgtatccgtttcatgccccacggatgaaataactggcagttgactctgtgcgattgcacgcgcaaccacttcttcgttgaatggccacagatcttcgattgaaccaccaccacgcccaataattaatgtatcaaaatcaccttgcgcattggcacgttcgatctgccgactaatttcggccgcagccgcatcaccttgaacttgagatggaaacaaaacgatctgcgcaatcggaaaacggcgccgagtagtcgtgataatatcgcgaatcactgcgccactacgactagtgaccactgcaattcgctttggaaagcgcggaagcggctttttgggtgcactaaacaagccctcagccgctaatttctttttaagttgttcgtaggcttgatacaacgcacccacgccgtctggttccatgcgttccacataaatctggtaactaccactgggctcatacagaccaatccggcccacgaccagaaccttcataccttcttcaggctgaaatttgaccttggcaaacgccgacttgaacataatggctgaaatcttggcatggtcatctttcaaactgaaatattgatgcgtattaggccggggacgataattagaaacttcccccgttaggtacactttacctaaatacggatcaacctcgaatttacgttttaaatactgagttaaagctgtcactgtcaaatattgttgactttcactcacttacatcactccactttgcaagttccaccgttgtctgcatcaaggtggcaatcgtcattggacccacaccaccaggaacgggcgtaatcaaccctgcgatgccttgagcagaatcaaaatcgacgtcacccactagtttaccattttcatcacgatccatgccaacatcaatgaccgtcgcgcctggtttgatatcagcaccagtgatcaggtgtgcaatccccgttgcaaccaccaagatatccgccgtccgggcgaccgcctttaggtcagctgttttactatgtgcaatcgttacagttgcgttagcatttgttaacaaagcggccatcggcttaccaacaatggtactccgaccaataacaaccgccgttttaccagccggatcaaccccatagtcagccaacatcgtcataataccgcgaggcgtatttgctacaggataattacctggaaaattggtgatcaacttaccaacgttcgtcgggtgaaaaccatcgacgtcctttttaggatcaatggccatcgtgatcaatggttcattaatttgggctggtagtggcgactgcaccaagatgccatgaatgctgtcatccgcattgtatgccgcaataatggctaacagttcgtcctgactagtagtcgctggcaactgccgcaccacggagtgcatccccaacttagtggctttacgattcttatttcgaacatagatttgactggctgcatcgtccccaacaataattacagcaatccctggttgaattccctgagcagccaattccgctactgccgttgccgtctgcgcgttaactttcttagctactgccttaccatcaataatcttcgtcacaagtgccacactcctctttctctgtctggtcttattttagcatattcaccacaatgatttatgaccggtttactaataagttattaaaaaaagtctggcaaatcgccagacttttacggtagaacataagattgttcggttttagactaattggcttggtttttaaccactttaccaagcaccccgctaacgaatttccgagagcggtcatcactgaacgcctttgtcaattcaattgcttcattaaccgcgaccttagttggaacgtcgtcaacaaattgcaattcaaagaacgcgatgcgtaagataatcaaatcggtcttagccagtcggtccaacgaccacttctgacttaaataaggctgaatttgagcgtctaattcaacttgatgttcacgaacaccagttactaacgtacttaaatatgcgggaatttcaactgcatccgcttcttcagggttgagtaactgttggaacaactgattttcatcagcgtctgggttagcattcaacgcgaataaagcttgaaatgctttttcccggatttcatgacgcgttaaactcacgattcttcaccatcttcattttcatcggtctgggtatcttcatcaccaaacaagttgtttggatcaatggcactttcagtcttctcagtcacgataccagtgatgtggacattgacttcacttaaggcgaggtcggtcataaataagatttgttgcttgaccttatcttgaatcgctaaagcgacttttggtaccgaaacaccatagtccaagtatgcgaacacatcaacactaatctgatcatcgacgattgttaacttgacacccttaccaagattcttcttgcgaccgaacaactcatttacactggaagaaatcgtcccttgcatccggttaacgccatcaatttgacttaccgcgataccaacgattatttcaagcacttctggtgcaatttgaatttgtcctaagctgggttctttgctttgtaacgtaatattgctactgtcagccattttgacattcctccaattccatgtttgccggtattagtttttctaaaaattaagcccgtgaaacgtacgtggagtcaacggtgttaacgatcagcttgtcaccggccttaacgaagaatggtacctgaataattgcaccagtttccaacgtagctggcttggagccaccggaagcggtatcacccttaatccctggttcagtttcagcaacttccaaagtaaccgtgtttggcaaatcgattcccaacacttcacccttataaagcgttacttgaacttccatgttttccttcaagaacttcaattcgtcttgaatgtggtcgccaggaatttcaatttgttcataagtttccgtattcatgaagacatagctgtcaccatcggcataaaggtattgcatcgtactcttttcaattggcgcttgttccatccgcgcaccggcacggaaagtcttgtcttgaacggctcctgtccgtaagttcttaagctttgaacgaacaaacgcgccacccttaccaggcttaacgtgctggaattccacgatgcgccaaattgcattgtctacttcaatcgtcaaaccatttttaaaatctgcagttgaaatcatttttaaaaatcctcctcaaatatatctttataactataacaagaccgagccgctgtggcaactgtcttaactataaaatcagtaaatcacgagttgcagtcgtcagtcgttcatggccctcagcagtcactaagacatcatcttcgatccgcattccgcctaaatctgggaaatataccccgggttcaacagtaatcacactgtttgcaactaaggtgccagtcgtgttttttgagatcaacgggccttcatgaatggcaagaccaatgccgtgacccataccatgattgaaggcgtcaccatagcccgcttttgtcagcaaatcgcggccaactgcatccagttgagcagtggctgctcctgcttggacctgatcgatcacagcctgttgagcggcctgcaccgcctggtaggccgtaaccaacttatcatccggagtacctaaagcaaacgtccgtgtcatatctgacgtgtacccgtccaaaaagtaaccaaaatcaagagtaacaagttgcccggccgtcaagagtgctttagaagccgtcccatgtggcaaagccgctcgtgcaccaccaagtacgattgtcgtgaacgacggcccacttgcaccgtgcgtccgcataaacgcgtctaacaggttgctaacgtcgatttcacgcatgcctggtcgcacgatactcgttacgtattcgaaaccagcatccgccaaacgtgcactcgctcgtagccggtcaatctcatcaacactcttggtgatgcgcaactcatcgaccacgtctggtaacgcaaccaaatcactgaccaagttctcatctaagtaactgtaggctgtatatggaatctcggcctcgaagcccatgaccccagtaccggttttggcaataatatcacaaacggcccccagataatcacgtgtaatgactaggtgctggtcatcatagtgaccggcaaaagctgtctgataacgggcatccgtaatcagataggcttcctgtgccagtactagcagataaccatcgccggccatatcagccattcctgttaaatattgaagattagctccatctgaaactaaaaacgcatcaatttttaactgatcaaacttattttgtaaccgttcaactcgactcattatttcgtcactcccatcattacctcacgcttcattataccaaactttccaaaaactgaaggtaatgatttattgaaggccattcgtcaatcaattacgtttacggctaagcggcccgtgaaccaataatagtcgcaggtatccctagattgcttcacaaaaaaagagcctccctgcagaggctcttcaaaaattattttgctgggtaaacagatacttggcgcttgtcgcgacctttgcgttcaaaacgaacgacaccgtcagccattgcaaataatgtatcgtcgccaccacggccaacgtttacacctgggtaaatatgggttccgcgttgacgataaagaatgttaccattcttaacagtttggccgtcagcccgcttagcgcctaaacgccgaccagctgaatcccgaccgttggcagttgaaccgccacctttatggtgagagaagaattgcaagttcattaacatagtaaagtccacctccgaatgtggttatcgtgtttgttcacgaactcggatgtaatctccgtaattcgtggccacatcgttcaaaccaagtgtgaaactttcaagtaaggtttgtaattgtgtgttcgccaagtccagcttagtgaaatctgcaattaatagcccaccattggtttcatcactttgtactacgggttgcaagcgggcaacttgttcaatcccattgattgtactaattgctaacaccgaaaccgctgcacaaacgatgtcttgtccataagcacctgaatcagcatgtcccgtcaacttaaaagcggtcacttgaccggtcgcattacgagaaatggttgcctgaatcataaagaatgcctactttcttaattatgcattaattgtgtcgatcgttaccttagtgtatggttggcgatgacccttcttagtatgttggcccttcttggccttgtacttgaaagtaaccactttacggtcacggccttgcttttcaacagtaccttcaaccgtcgcaccatcaacagtcggcgttccaaccttagttgtgtcaccaccaacaaagactacttgatcaaaagtaaccttgtcgccagcagcagcgtcaagtttttcaacgtaaattgcttggcctgcttcaactttatattgtttaccaccagttacaataattgcgtacacgtttgtgcacctccttaaattataaatcacttagactcgccgaatgtaagtgccattgctgaacttaagactcaatccgtgcggttgtagctgtagaagtccacaaatacaacaggaaaatattatcaaattttttcataatagtcaaggattgatttcacttcacaaaaaagtccgtgaaactaatgctccctaccgtcatcaaatggtgcatttttttaatacacttggttaagtaatgtggcgtgtagatcatatcattagctaaccaatcagtaatcaggccgactgtcgcagaaacgtaatacgcgatttgaatgctgaccggtacttccaaatcagcaaattgatcctgaaaatcacggtgaaatttcgtcatccacgtcgtcatctgctgattgatccgttgattgaccgctaactggcgctgatctaacaatagcgtctcaaaggcttccgcgtgctgactgatgtaaccgagtgcctttgataaggaaaaaacatgcacccgctgtaacgggtcagccggattggtcataatatcacccactgaaaccgtcacgatggccgtttcaaacaattcacttaccaagtcatctagggcctgatcaacaaatgctggcttgtctttatagtggagataaaatgttccgcgggtaactgctgccgtactagtcagtttttgcacggaaatgttatcgactgtttctgtctgtaatagtgtaattaatgcttgtcgcaagcgccgccgagttttatcgacacgcggatcaacttcatgactcatatctgctccctactttcatttcataattaatataacattaattactaagagcgtctaacagatgataatcagccggacaaatagttagattacgtctaagatggttctcagtgatctatctggcccattcattcgactgacacatgattgatatggggctcacctacctgccactatcatactagctggttagtccttacatgccttagcatcaattcaaagctaaattgatctttagaaacgctgtaaaggattttatcttgacaaccgaccgaaataaccgttatactaataatgcaatttttgggaaaagtctggcttttcctgttaattcggttgcaatgtacactattcttgtttaatatagtcgttattggactaatcaaaggagggacatactcttatgactgttgttgcaaaaccatataacacatgggcatcacgtcggccagttgctgggaagcaaaagcgcattcgtcgcgaaaaagaagttgctgctatccaacgttgggctgccggcaagactgacaccatcgaaaaaacaccaaaaatcaagtaattaaaaaagaactgctcatcttgaatgagcagttcttttttaattacttgattgtataatgccaatgtgcaagataagaactcccgttgactaacggtcattacgggaagcagtgaaatgcttactgcttgcattttctttggcaacaaagtttgaataatattgaatgccaccagcgatggcgatgatcccgacgattgcaaatactgaacccataagaattctccttccttgttacatgattattatcgttttgttacagtaacatttcaagcgaaataaactattttagtcagttttgttaatttctttatcttttcttaagtattttaggagatattggttcttcgccgtcgccatttaacaaccccgtcttgcaaaaattaaattaatgatgaccggacttagttaccgctattacagcgtttatattgtgtcgttcttcaagcattaattggtattcatgaaaacaatttcctcgttcaccaggctaacttcatttttgactttcaccataatgaccaattatctcagcaaaatgtgcttactgtaatttagtgctttttcattacaaatattacatttttacatcattctgcttactcacgcctttttttaactgctgcacatcggtgaaaaattaaataaaaattgacactctccagcttcttaactataattaatcttgttgttgtcacggtagctcaactggatagagcatccgccttctaagcggagggttgtgagttcaagtctcactcgtgacataccatcgattcggacctgccattttaaaatagagaagcttgttaaaccaacgtttagcaaacttctctatttttggtttctaataaatttcggcagccaaatcgtattcgtgcttattaaatcagccaattgacggcatagatattaaaaaggtcaacaactacctaaactgagcatccacataaaaaaacaaaagtattaggttcacagcttgtatgagtgaaagagcatttgccgcattggacaatatcaccctattacctaaaaattgcattctatccaattaatttggtggaagacaaactgaaaatatcaaaattgtaacagtcgtcgtttataataccaatttacaatcaagacaccgtccaatccaccacaaccttggtgtagtacaatcaacgtatctaatactgtctgggggaatcaacaatgcttttacgccatggcttaaccagtaacatttatctgaacgattacttaacgtttattcagcaagggcgtgacacctttgaatttcatcataacttattagtcgcacagcaccattaccacctagtcatcaacgcccaccacgcctttaacgctttctacgctgaacagaagcggctggccgagcagctgatggactaaatcaattctcgcatcccatcctaatagtgcgtataatatgttttgaggtgaaacatattgaaacttgaagcaattgccggaaatatcgcgcatgccatcaaagatcgttcaactgacgggccctacgtactcgcggtcgagtttacggacaaagccaccaagggaaagtcagccactggttgtgtcatcgtccggatgccagatcaccagcactatacgatcaccagcaatgactttcggtatatggatgcgggcaaagatactttagctgaggaactcggggccttctttgaatgcgacgatgatcttgatcaacgacaaacattgatcgaccaagttaatgacttagttgcacaagacgccgataacgacgcgcaattaatgacagaggcttaaaaaataacctagttacgtgatcaaatcgcgcaattaggttatttttttaatagttatttgcttgtcgttgctcattgacatgatttttggccgtaaacgccgtctgtatctcgtcctgagtaaaaccaaaatcaactagcccaatcttcaagaaaacgtgccaagcgtgctggtagctctcctgacgatggttaaagtaagcatcatagaggaggtgcttgatcgccaagtactgtttattcaaatcagtcgccggcttagccgcaatcgtagtcaattgctcaggcgttactggaatcaaatgcgtccactgttgaatcgctgagacaaggaagaagaagtccatcgcatctacgtattcgttcagcagcgttgcgcggtgtgtcttatcaggatccgctttgccacgatgaatcttccaaactttgaaccattccgacgtattagccatttctgccaattcgacgtccagtgagaccatcgcattttgcaaccgttcttgtggccgccaatgaatctgttgacgggccgtaatatcgcggtctaaacgaatcgactgttgtaataacgttgttagttctaacatctaatacccccgttacttaagcaaatactaatggatccgcttttatttctagcgaatcgatattttctaagtaccaatcacgcatgaacccaaagtgtaacaacacgtcaaaccacgaaactgcttgatcaggatcatgaacagtcaggacccattgttgactaccgccagcttcagctgcatcaaagatatcaactgtcaaaccagcccgcagttcaatttgggcaccatgtccttgctgtgaattacgcaacatgtgctcattcttagccgcactgacaaacaatttgtcaacgattgcccgatctaaattagccgaccgaagttcatatttagccgcgttagcaacgtccaaaatattaaagtcgacgttaaagccaaaatcatcttgtaagcaatgtccaaatttaattagcgttgcgagaaccgtattaatttggtcaaccccagtccccttcaacaataatttattaataaataaattcgtaaacgccgaactattaaaccgtaacaagcgccgttctaaatgaatataaaacaagttttcgccagttgtttgttcacgataatatgcaccaccgttgccgttgttcaccacttgatacaagaaggtgtaatcatccgttagcgccccgtaaacgtgatacagcgcttcagtatgccgttgagaattcagcaccgcttgttcatcaccatgcatgcccaataaccgactcatgaagatcaaataataatcggcattctgatattgatggggaaacgtcacgtaagccgtatccagtttaaagtctgctagctgttgtgccgctgctaacagtgtctccccgtcagttgtatcaatcagttggtccatcaaggccgtaaatttttcaccattagcgagtcctttttttaagccctcattgaacgtactcagcttaccgtgagtgctcagtgttgccgtgtccatctgcttgtccgtattattcgccatcagccgctacctgcgccttcccaatcagcgtggtcaagtagtcaacataaagactacggttacgctcattaaaattctcaaaactcttaaaggcgttttcaatcgcttgtttctcataagctaaaatcgtatcttccttagaaagcgttaaaatcttagcttcgttatccttcatggttgcatgggcattattagcttgttcgtcttcatcggccaacttagttaactggtcaataatttgctgccgttcttctttgatccgaccagaatcaaatagtgagttacgttgcccattttcctttagttgctgccgcaattcttctttttgcgcatcacggtctgattgcgcgtcaatcagtttctgtagctgatcgctaccagctgagatctgctgaatacgatctgtattgaaacgtttgtgcgcgggagccagttcaaacgtcttttgtaatttattgtattcttccgaactaaattcaaaggcgactttcaaaacgttcaatttaccaaaccggcgccgatcccaccagttaccaaagtaaatctgaaattcgccgagttgggtttcttcataataaaagaatgggtactcatgagccaaataatcaattaacttggtactcaagtagtgactgattgccggatagacatccgtaattaaatccacttgggcgttacgggttggatccggttcctcgttaagtaaggcttggtgatagtggtcaccatcgatcaattcgtagatcaaccggtcgtcaccagccgtaattgcttggcgcaccgtagttacatagtctaacttttgttgaagtcgcttcgtaagcgcgcgcgtaggttgatcttgtttttcaagatcaggctgattttgtttttccataataatctccttgcaatcaataataattgaaaacttgctgaattgcattgttgttcctaatgttaccgaaaattagtgcattaataaaggttaacaccactaatttaccaattttataacaaaaacggctagttcgccatttaaggtgccctaaccgtcgtatttttatctcaattaatggtttagtacaattccatgtactgatcacgttcccattcactaacttgttgacggtatgaagcccattcaagccgtttagcttccaagaaactctgataaatatgtggccctaacgccttcttcatcgtcggatctgtctggaactctttcagcgcattgtgtaacgttgatggtaagtcagcgataccagctgcagcccgttcatcttcatccataacatagatattacgatcaacactctttggtggttcaataccgttcttgattccgtccaagccagcttcaagaaccgctgcaaaggccaaatatgggttagttgaagcgtccacactccgtaattcaaggcgcgttgacaagccccgtgcacttggaatccgaatcattggtgaccggttagatgctgaccaggccacgtaaacgggcgcttcatatccaggaaccaagcgtttgtatgagttgactgtcgggttagtgacagcagtgtatgaccgggcatgcttcatcaaaccacctaagaagtgataagcgtctgatgataattctaagccattcttatcattagcatcataaaaggcattgccttgatcatggaacaaggacatgttcacatgcatcccagaaccattgacaccgtttaacggcttaggcataaaggttgcccacaaattgtatttccgtgcgatggtcttaacgaccaatttgaacgtttggatatgatcggctgcagataaagcatccgcgtacttaaagtcaatttcatgttgaccaggtgcaacttcatgatggctggcttcaacgttaaaaccaagtcgttcaagttcaagtgcaatgtcccggcggcaattttcacccaagtccattggtgataagtcgaagtaacttcccttatcattcaattcggtcgttggttcacccttttcattcatcttgaataagaagaattcaggctcagtcccacagttaaatgacgtataacctgcttcgcgcatatcgttcaagacacgaattaagttgttccgtggatccccttcgaacggcttacggtcagacgtgtaaacttcacagataatccgtgcaattttaccatgttccgtgttccaaggcatgatcaaccaagttgataagtcaggatacaggtacatgtcactttcttcgatccgaacaaacccatcgatggatgaaccgtcaaacatcaacttgttatccaagagtttgtcgagttgtgaaactggaacttcaacgttcttaattgtgccgaatagatcagtaaacattaaccgtaaaaaattaacgttttcttctttgacgatgcggcggatatcgtcttttgagtaggactgttttgccatgaaaatcgctccttaaattgattgactaacgaatgcaaacatcttagtgtgccggataattggggcccttgtcggactgcaagcctccgagattcaggaattcatcatgaaggattcggcgcacatcgcgatcagttagcggcttagccaagtcagcttgcttctgctcagctcgctgtttttggagcgcatatatttctttgattccagccatattgatgccatctgctaagtaatccttgatttcaagcaaacgatcaacatcattcaacgaaaacattcgccgattaccggcatttcgttccggcgtaatcaattcttgctcttcatagtagcgaatttgtcgcgcagacaaattggtcagcttcataaccgtaccaattggcaagacggccaacgagcgacggagttccttttccttcataacgaccctcctctttaatacagacttaatattagcaatgttatcatcgaatgtcaatcattcatgttagaaaatatcacacgttttatcataggtataccaatttataatttagcttaaccaactagctagccgttggtcaatcgagacccgtaattcagggtgttccaatagattgatccagtcgaccgacatcttgttacggaaccaagtcaactgacgcttcgcataacgacgtgagtcctgtttgatcttagcaattgattcgtcacgcgtctgctccccattaaagtaagggaaccattcgtgatacccgatccccttaccagccggtaacatggcgccaccttggtcaaatagccaccgcgcctcttgttccaatccggccgctaccatttgatcgacacgttgattgatccgagtatacagcagcgctcgctccgcggtcagacataaggtataagcatccagtgtgtcaccgtgcgtatccgcctgctcagaaaaaagctgaccagttgtatgcacgtactccaacgcccgtacgacccgtaccaagttagcgggcgcaattgcggtggctgcctgcggatcacgctgtttcaacgccatccacgccacatccgaaccttcgacagcggcacgatcaaaccaagcttgacgatacaccatatcaggttcattatccgctggtccaaactgatagcccgccaacaaggactgcaagtaaaagccagttccacccacaataataggcagtttaccccgagcactaatatcaatgatcaacgccgtcgtccgactgacaaattcagcgactgtaaaacgctgatcaatatttttgatatcgattagatggtggggaatgcccgcctgctcttccggcattattttagccgtaccaatatccaagtgacgatagacctgcattgagtctcctgaaatgatttcaccattcagctgtttagccagcgctagcgataatgccgtcttaccgactgctgttggtcccgcgattagtaatactttatgtttagttactgttgtcactcgtttaacctccttgtacctgcttacgaattcttcgtgctaatccagggtagtcggtaatcagtcccgcaaaccgatgacgataacagaaccgcatatcgcgttccgtgttgaccgtccatggccgcaactgcacttttggcaataagagccagtgaactcgcacccaacgaatatccggatgataaccgagaacaatgtgttgcgcatgaagccgcttcgcagtttgaaccttagtcttgaacaggctatccgattcgacctcgggctgtaaaatatgcaaccgttcgatcgactttccgtagaagctcgaataaattagcgtaaacggaacttgatgatggttaaaataatccgctaccaagtcttcgatcccctcataatgaatcttattagttttgatttccagattaaaaataccagtaaagttgtattgaatcaataattgaaccacttcatctaaagtcggaatacgcgttcccgcataggctgatgcatacttaacaccagcgtccaattgctttaactcggccaacgtgtgatccacaatccgacccgttccgttagtcgtgcggtcgacgagctcatcatgcataataatcagttgcccgtctcgcgacaagtgtacgtcagtctcaatgccatccgcaccatcctcgatagccgcaataaacgctggtaacgtattttccggcctggtccccttgctaccacgatgagcaataatttgagtaagcattgcgtttcaccccacttttttaaaaatcagattgaattgattgctatctccgcataaaacaagcataataaaactaacaattgctaggaggttttactaatgaaatcatttacccgtggcttcttgtttggggtcgtcgcaactgctggtgccgtaattggctccgtcttatcatttaagaagcaagttgttgatccaatcgaagaccaagaaaacaaattcgaagaaaaccggaaaaaggcgatgcgcaagagtcgctcagctcacaacggttaattaaataaaaaatggtggccgaacaagttgttgttctagccgccattttttaatacttcgcttttttcgtcttaccttcccaacgtgcgtaaccgggttttaaaatgtatagctgtgaataaccattcttagctaatgtgacgacggcccgtgtacttaacgtatgggtttgatcgtaaacgtagattggcatatccttgcgaagttcgttcatccgaactttcaaactgttgaacggaatattccgagcccccagaatatgaccagcgtcaaactctttcttttcacgcaaatcaatcacttgtgctttacgcattcccgcctgaaacgcttcttcgtccaacatcgtggacacctgacgccgtcgaatgtaactatacaactcataaataaagtaggccgcgattatgataactaacacgatgttaacatacgccatgccgctcaatgcacctaaaaccacgttatccctcctaatttctacttatctattttacacaaaaccgcttacttttactaggggtaagcaggaaaagccgcgattaaactgctgactaatcctgaagtcccactgattgctttatggccgtactcacccacggtttaaagaaatccattaaaacggtcgggggcctgagacccgcatttaaccacgctgttaattcaaaaccaagcatcgcggtatcacatttatgaatctgaatcgatcatctgaatctgactaccatgcaccagtaatccctgattgttagtcaaccgtttgaccgtaacgcccgtcttatgttcccagtcagtgatcaactgcggcaattgcggctttacttcacaatgaacatcataatgcggataaatacggatcgtcgtcgcattgatggctgttgtgcttgccagttgctcggtgttgtcctccgggtataaataggcgtacaggtctaaatccgggcctaacaagatagccccggcgctaataccgtagattggcttgcccgccagcgcgagagtcctcagtcgttccagcacgtgcgtttcacgcagattcttcaacagtaaaaactcgtagccaccattcaaaataatgaccgttgccgtattcaatgcggccaaatcatccgtcaatacatctaggagctgcacgtgcgcatatccaagctgctgaaccgtttgttgtagtgccaccatttgggggtgatttttacccgtgctgaccgaattgacaataatcacaattctcgcactgttcttagccaccggcgccactaaagtgaaaaaggcgtccgttacggccacagtgctaaacgcccgtgaagacaataataactttaccatcctgcttctccaatcaattctgtcatctaattcaattcacgctagtcgattcgtatcccttgtgccaaatcgcgtaacagttcatacgccgttacaacaacataccgacatgaaactaaaatcgcgcatagtctgaggacatgagcccaaatcagcatcggcaattggcgctcagtttttaaccacaacctaatcagcacagtttttggagcttagtataaaaaagaagctcggacattacttccaagcttcttgacgattgattttaacttaaataaaccgttgggccaatgaacctgctccgataacaccagcgtcgttacctaagaccgctaacttcaaagcagtcgtgtcgcgaatcgttgggaatgtgaattggttaaagtaactgatgacttgatctaataagaaatcaccagcagctgaaaccccaccaccgataatgattgaagatgggttcatcgtgttcccgacattagctaatgccaagcctaagtaataagaaacccgatcaacaacgcgtttagccaagacatcgccttctttagctaaatcgaaagtgatctttgaactaatttcttcaccgttgtctaataattgtttcaacttagaagcaccagagaattcttctgccatatcgcgagcaacgtgaacgacaccagttgcagaagcgtattgttccaaacaacctttcttaccacaagtacacatgtagccgtttggttcaaccgttacgtgaccaatttcaccggcaccaccggcaataccatggagtaaacggccatcggcgatgatcccaccaccaacaccagttccaagcgttacaaagacaacgtcactaccgttttcgccagcgcccttccaacgttcgccaagtgcagcaacgttagcgtcgttatccagcgtaaatttgatgccagttcccttttcgatttgagccttaactggttgtaaggtcttccagtttaagttgtaggcaccgataaccgtaccattatccaaatcaacggtcccgggagtccccattccaattccgataaattgagaacggtccatcttatataactcaatgtggtggttgatggaatcgatgatgttaggcacaatgtgggccccttcatctaaaatcgtggtttcaatactccacttttgttgaatatcaccattttctgttaaaatggcaaacttagttgtcgtcccaccaaggtcgactccgattaacttacgctccatgttgctaaatccctccattagtcatgcgccgcgtcttcacgggcgcgttctgcttctatccggtgctcatggctcaatacgagcttgacgcgggcatacatcttcgggtcaatgacaccagcttgatagagatgatcgatctcaatggccattaactcaatgtcccaaattcgcttgcctacgtacacgtacacgccaaattttttaagtaattgttggacgtcgtaaagtgttttcatgtgcatatcctcgattaattatacagttaaattagcatttgtaaaacccatttttagtaaagctaaccagccaatgactagaataaccgttgccacaattcgtttcagcggcgcaatcttgccaattcgtggtacacccagcagatagcctaacaaaaagccaccaactagacccccgacatgtccccagatatcaatgccattcgagaacatatcgaatactaaattcaaaacggttagtagtaaaaattggttcgtgagctggcgaatcactggattttcccagaacgattccccaatcgtcaaaaaggcaccaaagagtgcgaaacacgccgtactggcccctactgactgattattggataacgcgaaactcataatattaccactaatgccacccaaaatataaattgccagcatccgccaatgaccatacattgcttcaatttgcatgcccataaaataaataacgacaccattcagtgcaatatgggtaagtcccatatgtaaaaacatcggcgtcaccaatcgccaccactggccggccgcaattgcttgattgttcttagcacctagtgaattaaaaatcagcatggcgccgtcgcccatcagccactcgactaagaagactgccacagtaattccaagtagcacctgcgtgatagccggttcagtttgccaccagcgtttaattctcatcatgttgttcatcccctgctaccaagagttcgtctaacaagacgtcatattgatcaaccggccattcagcgtgttcaaaagccatctcgtcataagccagtgtcaacttcttacccggataatcagcgaggtaacgatcgtagtagccaccaccaaatccaatccgggcgtgccggtcacggctgtacccaagaccaggaactaagatcagatcgatctgttgcttggcgactggttcacccgtgacgggctctggaattccaaaagtcgttcgctcaagtcgatcagtcgcttggtaaggataaaaagccatttgacgatgcggcagcgtttttggaataaccaccattttgccctccgcccaagcttgttcaataagtgggcgcgtcgctacttcgatgtcactactaattgtcatggcaatgacctgggcagtttgccatgttgggcttgcaaataattgggtctgtaacgcctggttttgccgttgccggtcagccggcgtcatttggcttaatcgcccaagctgttgcttacgaaatgcttttttctccacgtacggcacccccgaaaataaaattggtataaaaaaatctcattcattaacatgtcaaattgaaaaatcaatttggcagttgccaacaaatgagaaacccattgtctgatgacaatgttacagaaaaaacaacaggagtccccgttgttattttgtttcacgatgtaatgtcactttgtgttcccgtggacaatacttcttaaattcaacccggtccggattgttccggcggttctttgaagataagtagttgcgttcatggcattctgtacattcaagtgtaatgtgtacccgcatgttgttgaccctccaaactcattcgcatattacagggccggaacccttaacttgaactactataccattaatgattgaaaaataccagtatcaattaagatactggtacgaaaaaagctgattttttacttgttataatacttccagaacgctgcataaatttgcttagcaacgaccatattataatcaccactagtagcagtaattcctggaaaggcaaccgctatcactactttagggttcttataaggcgcataagtcaccaaacttaaggtttcagtagatgtcgttccgtggaatgtctcggcagtcccagacttagctgcaaccgctggtgataaactagctagtgcactccccgtccgctgcgtcatactcccatggaccacatcccaatacccttggtgtacgacatcaaagtatgaggatgggacgtcaatggtattcaggacacgtggcttaacattagtcttaacagccccttgggacccgttagatttagtcccagtaatagcggaaacgatgtgtggtgcaatgcgttgcccaccatttgccattgtcgcaatgtattgcgccagctgaatagtcgtgtaagcatcgtagttcccgtaggacaagtctaacgctttaccaatatccttctgtgccgaagaaccttggtaacctgaggcttcacccggcaagtcgatcccggtcttaacacctaagccaaactcgttaaaataaccacgaagtttagagaagaccgaattagacatcgtcaaggctttcccagacgcatagctgaagttaccttccttcatggctaattgcatcatataggagttagaagaaacttccatggcagtcgaagcgttaagactcagactagttccaccattcttgttaaaccatgacgacttggtggccgttccggctaacttgattggcgtatcggtcaaagtactattcgtgggtgtaatcacaccatcttgcaaggcacccatgaccgtggcacccttaacgaccgaccccataacgaaggattggttgatggttcccaacgcattttcagtcactttaccagtggatagattccggctggcacctgctaacgcataaatggcaccagtgctagggttcattacaacagcataggctcctggcgagtaggcattactactccccaccgttttggcttcagacataatgatactttgaacctttttctggaacttcgaattaatcgtcagctgaacgttgtcacccttctggccaccgtacttcttaatctccttttgaatgaccccatcctgcgtcttgacctcagtctgtgacttggttccacgaaggacattttcgtactgcttttccaattggctttgaccaaccgaatcatcacgagaatagccttctgccagcaaggttttaatgctatcactcggtaacccttgcttttcggtcgtaactgtcccgagcacactactcaagtcagtcccattaggataactccgagtccaactcgttccgaccttaactcctggcatttcggattggtgctcaccgatttcagcaagctccgtactcgtcacaccagtcgatttgatattgaccgttgacagcgagtacgccgaactcatcttataataaatcgccgccgcattcttttgcgtagacgttaaattattaatgatatgtttttccgcataggcgacttcccgtgcgtacaaaacatcatcgtcgctagacgttttaaccttcttagcaaccgactttaaattagccgcccccgctaagtaataatcagccaagttccgatccgttaatgtatccgttggaatggttaagtactcacctaacttattcgccacttcgtacatcttagtcgacgcaactgacagccccttcgtgtattgaatcgcttggtgggatttgtttcccactaagacccgaccggttgaatcataaatcgatccccgttgaacgtttcccgttgccgtcgtattattggctgaattcactgtacttcggaacttctgtccgtagtcaacttgtaagtaagctaactgcgcaatcaacgcagcaaataacaagaagacgatgaaaaacaagaagttcagccgaaatggaatatgcgacttgttgggatcacgatttatcgtaattttcttaaacaatttcaattctcaggcgctcccattcttaatttggtaaacatttcgcaaaaatttaccagatgatactagcaatcctagataaataccatacttatgttattctaaacgatagacataaaaatttcagccgttattacggattttaatgtttttttgattatttttctgtttggctgtgaattattagagattgaggtggcaatttttgaaactccgtcgtttttttgacaagcgcacatggccattatggatcagcttttggttacctttactgatcatgaccggttattttatttatcggcacatggctccctttggatcaagcagtctgttaacggtcgatttaggccaacaatacgttgacttgttttcctatttccggcataccctactgcacgatccgagtgctttcttctattccttctccaaaacgattggtggcgagatggttggggtctgggcttattacttaatgagtccctttaatttaatctacttactattccctggtcaatcaatcactaccggcatttttatcgtcactgtactaaagtatggtttcgcagggctatccttcgcctggctactaactaaaacgcagacgcaaaagggttggttggtgccaacttttagtaccgcatatgcactgatgggctggatggtcgccaatcagctcaacatgatctggttagacacggtcgccattttaccattggtcattttgggactggaacgcttgtttacaactggtaaagtccgttacttcgctggctggctggccgtcatgctaattgacaactattatatgggctacatggtcattttattcagttgtttatactggttgtatggtgcaactaagtattggcaaaacgtgaagaccttagcaactcacgccctcaaatttgcttggggtggtctgctaggtgtcgcattctccgcatggttgctattaccaactttctgggcgctcattcaaagtaaggctcaatataatgtgaccaaggttcattggaaacttgaatacgcgccctggaagatgttagctaagttcgtcaccggtactttcaacttcgatcagatgccatccggtcaaccgaacttttacgtggcatggttagcagttctcgcctttgtgctcttcttcttacggcgccagttcaaatggtccgtgaagttgagcgccttgattgtaaccgcgacgcttatcttatcattttgttacgaaccacttgatttattgtggcatgcgggccaatttccagtttggtacccttaccgcttctcctttgtcttttgtttctgggtcgtctggattggtgcccaagcactgacagacaaaataacgatcaaactgtggcaagcgctaacgatgctcgcattgctggtcggtttgtttacaaccatttacttgaacattaagaaagtcacctacgtcacccaagctaatctcttaattacaattggcttggcagcaattacattgattttcttaacgttgcctaaggaacgacgtctcatttatcaaatcgtcgcgttaattttagttgcgactgatatgtcgatcaacgtggtcgcttcattaaataatatttcctacgtgtcacaaagtgagtttggtaaatacacgcaagtccttgacaatgccgtcaacaaaattaaagctagcaacaatcgtttttatcgaattggtaagacgtttacacgaactaaagacgatccgatgcaggcggcctataacggtgctgatcatttcagttcgaccttcgaaagtattatccctaactttttcggttcaattggtcagccggatggggacggtgtggtcgcctacaccaacgggaccatgattaccgattcgttactggacatgcagtactttatggataaaacagtaccgacatcccagactgataacgcgaactatcgtagctacattccggtcaccagtaccaagaaagatctgacgaattaccaaaaatcggcaaagctcagcactaacaaagtcacgacctacaaaaatccatacgccctgggtcttggtttcgcagcgtctgacaagattactagcttgaaagtctccaaaacaactggcgatccgattgcccggcaagagttgatttaccaaaccttggcaaatcgttcaaccagcggcttgatcagtgccgaaaactttaacgaagtggtcttccaaaacgttaagaaggtcacgacgttaactggcgccgtcttgaacaaacaaaatttagcgaaaacgggatcggtttactttaagttcacgccgacaaccaatgattcctactacatcacgctcgggcaaaacctaactacttcgaatgcgagttactacattaacggtaaggaactcaagcagtacccaacttaccggcacacgatcgctgttaacgttgcatcgaatagcaagagcaagaccgtgacattcgggattcagatgaagaagacttctctctggttacaaaacttcaccctctacaagttggataatacccaattcaagaagtcggcgcagaaactccagcaatccccttggaacatcacggcccactcaagtcgtaagattactggtacaatcaacatcaagcatcgtcaccaagttttgatgacgaccattccttactccaagggttggcatgccactgttgatggaaaatccgtcgcaactaagaaagtgattaatacctttgttgctgtcccattaagtaagggcaagcatacggtcaccttgacgtatcgaccgccattcttaatcactggtagtctgattactgggattagtgcactcgcaacggctggttggtttatcgtccggcgtcgacgccaccacgcctagcccagttcacagtcaaagatgtggtcagcaaaaatcagcgttacctgaattgttaattcaggcaacgctgattttttgtccaaatattaatcgctattggcaagcactcaccagaactactcgttattgggcgtgtagtcatacttcgggccgtcactttgttcatcataatcaactgtgagatcatagcccttaaagaaccattcatcacggtcgttgacatagtaattgacaccatccttttcaaccatggcaatcggttgatggggttcgtcatcacgcatgatcccgattgagaagccactgtgaactgctgtcttgccataagttttgccgtaaaagcgcaccccattaccagtggttacacccatgtcatcatgaaaccacttactggccaaatctgtaattgttattttcattactaacacctcatcattgaaatcgtttacagtaattgtgccctttttgcccataaaacgcaacattgacagtcgatgagcaagccaatgaccagttgcgttcctgaaatgaccgctaagggagtctttatttacagcgtcattgttttgtggtgtacttaaactacttaaggaggtgaaacccatgcaagtgaacattgaaacggatcccggcacctcaattccaaccgtcacactgcatgttccagtcgactaccccgaaacggccgccctcactgctgctctcaaaaatctttcaattgaggccgctacgttaaccgtttcacaacgtggtcaactcgtacagttaccgcttacttcgatcctattcatcgaagcaactggtcaccaggtcgccgcccatacgctggataatgtttatcgtgttcccaagtcgctgaccgctgtgggcacaggcttacctgcttactttcttcgcgtctccaaatctgccattgtcaataccaaacaagtctattccttgaccaagacattgaccgggaacttgattgcgtttcaccactcacctaaacaactgtacgcttcaagacgctactatcgccaactcaaaataagtcttgaacagaaaggactgttataaatgcataaaaattggttttggcccgtcttcttaattgccagcgccgtcgttcttatcgttagtcaactcagtctcttcacgctccacgtcagcatctggagtctcttgttaacattgattctagttgcggctttaattagtagccttcgttacttgaatatgccgggcgtcgtcttcgctatcgcattcttagccatgatctatgcgcaaccacttggaatcactaagctcgtaccatggacaattttaggggctgccgtattactcagcattggtttgggtcttttgattcatccccgttatcaatatcattatcgctatcacaaccatgatcatgctcattacaatcatcataaccacgatgacgtccatgaatcaacgagcacaatcaacgatgaccatgttaatttagatctctcactaggcaacagtatccgctacgttcacagcgaaaattttcgttctgcggatctgaacgtatcaatggctggtgccaaaatctacttcgatgacgctgacatcaaagaaggccgagtaaccatcaatgtcgacgtttcattaggtagccttgagttatacctccctcaaacttggcagctacaggaaaatctcagcaactcaatgggccacatctcatcgacaggtacaccgaccactgctggcccgggtgtcatactaaccggcagcgtctcgcttggtgaattacgaattatctatatctaatcctactttactgtcggccatatcctgatcaatctgtcatgaatcatgattaaaacataccagtttttaagttcaaaaagggccagctatggacccactggaaaaagtcgagttcgtatagacttgcttggttgagcgcgtcctacaccgacttccaggcatctctgccaattgctgaaacgtggtggacaaagatttaagccacaaaccacgtcttaaatactggtcttccacgctttaatgccatattggtgaaacgtgttcgggtcaggctgagacttccggttagctacgctatgacgccaagcggaaattcaccgcttaacgtcctagctaggctaatcctcagccccggaggtcggaataggacgtgcaagtgctgatgaacagtaacccaaccaactggcatgttttcatcatagtaaatgctcaacaaaattgtaacgtgtccgatttactcacccgtttacctgctttgtgcagataagcgggtgttttgcttgaattccgaactcacacgcaaacgtgcttgttcagtaacgttcgttaaatagtggctggtaatcagtaatcgcgcttctaaaccaccaaaaaagactgtttcaaggtatccgctacctcaaaacagtcttaagcataaaattacgcgttttcaaccttcaaaattttaaccgtcatggtaccggctggaatgttgatggcaacttcttcatcaacgtgatgcccaatcaagcccttggcgatcggggaatcattagaaatcttgccaaccattggatcagcttcggcagcaccaacaatggtgtagctttctggttcttcatcaggtaattctttgaacgtcacgattttaccaacggagacttccgtttcgtcaatcttgtcactatcgatgatttcagcatattgaagcatgtgttcaaccgtcttaatccggttttctagcaagctctgttcattctttgctgattcatactcagagttttctgataaatcaccgtagctacgtgcgatcttaatacgattaataatttctggacgttgattaattcgaaggtcttcaagctctttttccagcttgaccttgccttcttctgtcattggatatgtcttatcttcagccaatgtgtttcactcctcaaatacgcaatatagttatcaaaaaccagcctaccatttcagattttaaaagtaaactcttaaatctaaaatagcgctggttaagacgttattttttataaaattgaacgaactttagttgtcaataaatcaatggcaacttcattttcgccaccttctggcacaattagatcggcataacgtttcgttggttccacaaactgatgatacattggtttgaccgtcgccaaatattgaccaatcacagagtctagtgtccggccccgctctttgatatcacgctgaatgcgccgaatgattcgaatatcatcgtcggtatcgacgaacaccttaatatccatcaggtcgcgtaaacgctgatcatctaggatcaataccccttcgacaatgatcacatcacgcggttcttgatgaatggtcttgtcgctacgcgtatactgctcgtaatcatagaccggcttttcaattggttgataggccagcaactgcttgatttgcttaatcatcaaatctgtatcgaaagccagtgggtggtcgtaattaacggcatggcgctcagccattgtcatttcactttgatcattgtaataggaatcctgttgtaagatcaacaatgattgaccagataattggttgtaaattgcattgctgaccgtagttttaccactaccggaaccaccagttaccccgatgactactggtcggcgatgtttattttcagtcatttaagttacgcctcattcttatttttcagcggcttcgttgtgcttcgaaaccttcttgatgtttgccgcgtgacccgcagcatcctttgcataatagacatcaccagtcttcaaatctgctacgaaatacatgtaacccttgctccgttgtgcaggatctaagactgccttgatcgatgttaaactaggactgttgaacggtccggggccgtagcctaagttcaaccgtaagttatacggtgaatcagtctgcaaatctttattcgttaacgttgacttgttagaattgatcgcatagaacactgaaatatcagaatccaagcgccacttagcatctaaccgattcaagaagacgccagcaatcaaccgccgatctttcgtcgtactgccttcacgttcaactaaggacgctaaggtcattacttcttgcacggacatcttcgacttcttaatttgcgcgtagtatggttcaagctcatcattagtcttcgaaaccatctgcgttactaattgtttcaaagttgttttcttaccaacaacataagttgccgggaacaaatagccttctaaacgatagcgaacttgcttagcactcatcgctgaattcaacaattgtggatacttcttggccaatgatttgatgaatgtttgatccttcattaaggctagaaattctgccgacgtgaaatcagtttgtttttgaaccgtcttcgcaatcgtcttaatctgactaccttcaacgattaggactttaccactagaactctgaaccggttccgatgaaccacctttattcaaggccttcgcaatttgagcaagtgacatcgaaggcttcaactgatagtagcccgcgtgaaagtttgataagttgtgtgctttcgtccagtattcaaagacaaaaccactcttgatcaccttttcgcgctgtaaaatatcggcaattttcttaccattagcaccgtacgggatatcaacttgaacgacgcgattgtcgctactgtcatatggttgcgtcgcattatcaaaatatcgataacccaatacccccacaataattaaaagtacgactaaaataccaacaacgccaccaataacgtgtttcgaaaatgatttccgctgtttttgttctgaacgattaggttcatttaccccacgatcttgtgaatcgttttgatccttctgatcttggttatcctggttgttattcaagactcgcccctccatttattgattaatcttatcaattatacaaaactgttgcccagtttgcactagttcgccattagttttatggttttttaggatcttggacacacattaaacgccgaatgacttcaaatcattcggcgtttaacaagactatcaacaaactaacgaatttcagcacctaattcatccgttaaggctgtcagtactttttcaaatgctgtcgtaacatcatcatcgactaacgttgcgttttggtcttgatacgttaacgtataagctagcgactttttacccgctggcacgtgactcccattataaacatcaaagagttgaacgtgccgtaaatgcgcgccgcccttcttgttgatcaaggcaaccacggttgcgttggtcacatcgtcatcaatcaacatcgccacgtcccgggtgatacttgggaacttggaaatcggttgatactgttgacgcgcttttggtaaggcaatcaacgccgttaaatccagttcaaagacataagtttcccgaatcttgtaggctttggcagtcgttggatgaacttcaccgacgaaaccgactaactggtcaccaacgtaaatatcagctgtccgaccaggatgcatctctggatgttcggccgtggcaacgtaactaacggcatcttgcaacgccagactcttcagataaccagccacgatacccttaatctggaagaaatcaacgggttgttcggcaacgccccagctcttgggaaccatggaacccgtaatagctccggcaatgtgttcaatttccttcggccggacttgttcaggttgactgtaaaagacccgtccttcttcatacaatgccacattgtgttccttacgagcattgttataagctaaatcatccagcaaaccagaaactagactcaagcgtagcgtggtccgttctgaactcattggaaagtctaatttagtgacgtcactagcatgaagcgcaaaggccttcgacttagtctccgtggtcaatgagtaactgatggcttgcgtgaggccagcactttccattaacttacgtgagtcacgaatcacctgttgggtctcattaagcttaccgattgttggttggcccgttggtagggtcgctggtaagttatcataaccgtatagccgggcgatttcttcgataaggtcagccggaatatggatatcccaacgccgtgatggcaccgtaaccgtgaacgtttcattagcaacgaccgttggaaagtccaatcgtttaaaaatatcactgaccgtgtccaatgacaactcagttcctaagacgtggttgatccgtgctaagtcaatggttactgtcgttggttgcacatcctcatcacgaccgatgaccataccactagcaacttgaccatcaccaagttctgcaatcatggctgcggcagcgtctaaggccgttgcggtcatgccgtggtcaatgccccgttcgtagcgcattgaagcttcgctgtgtaagtcatgattatgggcagttttacgaatcttaactgcatcaaaaaccgcaccttccaacgcaatggtcgtagtctgatcagtgacttcggtcgctaggccacccatcgtcccagccaaacaaattggttgatcgccactacaaatcaacagatcactcgttagtaattcgcgatcttcaccatctaacgtcgttaaatgctcgccagctttcgccaaccggacgttaatttgaccgtcattcaattgatcaaagtcaaaagcatgtagcggttgtccatattgcatcaaaatgtagttcgttgcgtcaacgacgttattgattggccgcataccagcattccaaattcgaatttggagccataacggacttggcttaatcgtaacgtttttaattagacgcattttgtacattgggacatcatgttcgtcggcagcgacagccacatgtagatcatccgcagccaccgtcgtagcatcttcatgcaaatcaactttcggcatcgttggttgttggtcgtaaatggcagcaagttcatgcgccgtaccattcatactaagcatgtcaccacggttaggggtaacggacatgtcaataatttcatcatccatccctaggtatgaaaagaccggatcacctggcgtggcatcgtcaggcagaatgaaaataccatccgcaacttcttttggaactaacttttcatcaaaaccaagttcgtctaaggcgcacagcatcccatttgatggaactccccgcatcttactcttcttgatcttagtgtgaccaccaatccatgaattcggtaacgccacgatcaccttttcgccagccgcaacgttaggtgccccacaaacgatttgcaagggttctgattcgcctacgtccacttgacaaacgtggagatgatcagaatctggatgtggctcacacgttaagacgtgccccactacaacttttttcaatccttcactgggacgaataacaccgtcaacttcaacggccgtccgttcaatcttttctgctaattcatcggccggaatgtccagcttcaaataatcgcgtaaccatgtcgtagaaattctcatgtggacgcctaacctttcttatagaactgtgacaagaaccgcacgtcattcaagtagaagttgcggatatcgtcaacaccgtatttcaacattgcaaagcggtctggtcctaacccaaaggcaaaaccaccatattcttctggatcaatgccagacatttctaacacgtgggggtgaaccatgccggcacccagtacttcgatccaacccgtttgcttacagattgcacagcccttgccattgcaattaaagcaagttacatcagcttctacggatggttccgtgaatggaaagaagcttggccgtagccgaacatcgaattgatcgccaaacaaagtcttggcaaccagaattaaggtgcccttcaaatcagccatcgtaatatgcttgtccacgactaacccttcaatttgatgaaattgatgggaatgggttgcatcatccgtatcacgccgataaacgcggccaggtgacaagaccttcagcggtcctttagaaaaatcgtgattttcaagtgaccgcggctgatcagcagacgtctgcgtgcgtagtagcacgtctttggtaatatagaacgtgtcttgcatgtcacgggcgggatggtccttcggtaagttcaaccgttcaaagttgtagtaatcttcttcaacttcatcaccatcaacaatttgatagcccattcccataaatagatcttccaattcagtaataatctgggtaatcacgtgaggctgaccttgtggaacttcccgacccggtaacgtcacgtccagtttttcggcagccaattgctcattaacggctgcttgttccagttcttcacggcgttcatcaatcgcagcctgaatccggtcacgaacttcgttggcataagcgcccacctttggccgttcttccgggcttaagtcgcgcattccgcgcaatacttctgtaatcggaccctttttaccaagcaaatcaactttgacttggttaacctttttcaaaacatcggcggatttaatatcggccaagccttgatcgcgtaattcggttaatcgatcttgtaaactcatatgctgcctccaatttttagttgcgttgcggacaaaaaaagaccccatccctgaaaagggacgaggtcatcgcggtaccacccttgtttgcatagtagtcactatgcacactcactacccgtcataacggtcgggataccggaaaattatttgtttacacaaacgcccaatttcagctcagagagtgaattcgtcaatcttggtcgccagggtgctttcaatcggtgacacccgtccctacgacgccgtaactaactactatttctcgtcaaggcttttatctacattgtcagtttatggcaaagtgccctgcacgtcaaccccgtattaggattcgaccgggctgaaccacttatcagaccagttatggaccgtatccatgacctgtcgtaaatcttgccccttcgtagtcaagcgatactcaatcagggcagagtcacaatgggttacccgactcacaatgccgttttcttccaattccttgagacgaacgaccagcacccgatcactgcacttaggaatccggcgtgccagattcttaaagcgttggggaccgtcttccagtaaaacatcgataattaaaccgttccactttttccctagaattgagaacgtcttttcaaattttggacacagttcgaaatccacgttggattctgttaccgtgtcagctagcatttctgacatgcaatgacccccaattattgaattaaccggcggagaccttgcctcggaaccgatctagttgtttggccactttcatacgtaatggtccaaaaaattcatgttctgcttcataatcatcaactaaagagacgagcaaactttcacgatatttaggcacagctaaagttgcaccaaacatatgcttcaaaatgatatctttttccatcggcgttaatttcgttaacttttcagcgttacgtaacgctacccgcggatgaataaatgcgtgcgagccgagatcaaacttggtttcacgccagtcataataaaacaaatcatgcaataatccaccacgcgccactgccgtcgtatttagatgccatttcttcgctaaaacataactatcatatgaaactgcaatcgaatgatccaatcgatttgaatggtggtgctgtgtaaactcagcaagccgctgaacggccggctgtgctaataaatcttcgacgatcgccacgtattcagaatcttgttgccacgcattattagttttcatctaaagctccctttgctaatatctacggctattctactaaaaagtcagtcattttgaaagtattttacctggattttagcattttcttactaattgtaagttagcgatataaaccgaacattaaaacgccagcagccacggctacatttaacgattctgcttgccccttgatgggaatgtataagttttggtctgtccgtgccaataattcccgactcattccattaccttcgtttcccatgatcaagccaaaactagccggcgcgtcaatatctaaataccgggctgcctgtggatttaattctgaaccgtagactggtgaaccctgcgcctgcaattggtcaaccaacttgtcgagatcagtactaatcagttgtaaatgaaactgactcccctgcatagctcgttcaactttgggttgatggatgtccaccgtcccggtaccgaaagcgacgccggcaaaacccgcagcatccgcagtccgtaccatggttccaatatttccgggatcttgaacattatcgagcagtaaccaaggccgcgttaaatctaattgtgatagatcttcaattgcagcaggcagggtcgccagcgcaaacaccccctgcggcgtcaccgtcgcactgatatgtttggcgacttcatcagagatttcaatgaccgctggaaaatgagtcaagtccggttcggtcgccagttgcttggcagtaatgagcaaggtctgaatcgcgacgtgtgctttaactgcttcgttgactaaatgccaaccatctagcaagtattgtccctgttgtttgcgtcccttctttgtttggagctttttccacgccttgacgtgcgcattttgtaatgaattaattttttccatcgtcaacttcctttaattaatcggttgaaacatcagccggtcttgtcaattcggggcaccctgtatcattcgaaagtgtccgttttatcccaagtatagcatatcgcccgttgaacatttccatgctattatataagtaatacagattgtactaattatgctaacacaatacaatcagcaatcagtacaatcaagatgctagtcacaggttagactagctgaacaagttaagtaaggaagtgacacaatgcgtgcagtaacattaaaagcaatcggccgggtccagggggtgggcttccgttgggccactaaagttgccgctgacaaatgcggcgtgaacggaatcgttcgtaacctgatggacggctcagtctttattgaagccgaaggcgaagatcaacgagtgcaagtctttatcgacgttgttcggcagtcgccaaccgattttggcaaggtcaagcacctcgaagtgcatgaagttgaaccacaaaactatcacgattttcggataaccaattgaattcccccgacatctttagtatcatcatcattatatgactttaacaaaggggattattaactagtgaaatcaaaaaaaggccttacgctcaccatcaccttaggaacgttagcactgtttctaagcggttgtgtgcaaacgaccaaagctggtaaaccatacgggtttgtttacgagtaccttgcaaagccagggcaaaacgtgatggaatggttgtcacaactattcggtaacaactacggttgggcaatcatcggcttgacggtcattgtgcgactcgttttactgccaatgatgattaatcaacaacgtaaatcaacctaccaacaagaaaaaatgtccgcggttcggccacagatggaaaaaatccaggcacggcaaaaagcagcgacgactcaggaagaaaaagccgcaatcagtaatgagctcatgcaactttaccgtgacaacggtattagcatgactggtggtattggctgtttaccactactgattcaactgccaattttctccgccttgtactacgctattcgctattcgcctgaattatctaaggcgacctttatggggatctcccttgggaaatccagtctgattctagccattttagcctttttatcctacttggcacagggttacctatccatgattggtttacctgaagaacagaagaagacgatgcgtctcatgctcattatgagtccggtcatgattttatttgtttccatgtccgctcccgcaggtttaggactttacttcttcgttggtggtttgtttgcctgcttgcaaacactgatcatcaacttcttccggccacgtattcggcgtgaagttgaagcagaactcaaaaagcaccccatcaaaacaccaacaccgacgcaaccaaagccgattaatgcaactgaatccaagcctagtcatcctcgtccgcaaaataatgcggggcgtggtcggaatgccggtaaacaacaacgacaccgtaaataaccactgaagcttaatcaacactaaagcaccgtcatgaaaattctcatggcggtgctttttacgttgcacctaaccggcacgcagccgtccccttaactgatttcgcaaacattaccacgagatgccaattaacgctgccaggccgatcagatcaatttcttacttagctggtaggaataacccacggtcaaaatcacgaccaacacgataatcgtaacaaagacattgagaaatgagtctgttgacatctttcccatcgctactaacagcggtcctgagattccaaataatctgcctgctagcacattagtccgatgccagttttcttctgacaaataggtccacggaatccggattccaaccaagcgattacgagaagtatatgccatcggtaatgcgacaatcgagatgattatcgcgatcagcgcaaagccaatcgtggaaatccggttgaaatcaataagtaacaaataaaataaaacggtcaagttaatatcagcaccgagatacgttcccttgcgccagttggaattctgtttacagatcaaaattaaactaatcccaattaaaaataacccaccaaccacggccaacggtgcattacgaatttgccacatgggcccaccactggccagtttaatcactactaagatgaccaaattgattaaatttaccatgataagcaatttaaccccaagcgtctgttgccatttttctggaatcatgagtaagcccccattctaaactgctagccagataaggttgcagcgccataattattccaataccgagtcctacgttatgcgtgactaaaacacgcaatcgctgaaagcaaggatgaccagcaaattactcacccgtatgttgcaatcaataattgctcaactagttaagcgcaattatagctgaattgcataataaggggtagaacttgcccactttcaagtttgtccgccaacattccaaactaaatcaaacgtatttcgtcaaaattaatcaactttgggcagacgacacttcgagacctgaaattttatgtaaatatgcgataatggaaattaacaattcaaactcaaggaggaactcccatgaagttactacatacagcggattggcacatcggccggacgcttaacggttattctttgttagatgaacaggaagcagcgttcaagcaaattctaacgattgcattggctgaaaaagttgatggtatcgtgattgctggggacatctacgaccgggccgttccgagtaccgatgcggtcacttcacttgaccacatgctgcaggctattaatatcgagcatcacctaccaatctatgccattgctggcaaccatgatggcgccaaacgtctcaactacggtcgtgaatggctagcctataataattttcatatcaatacgttactagccgaggccttcacgcccatcgagaccccaacggcacaaatctttatgttaccgttttttgaccccattgacgcgcgggtctactatcagcaacaaggtttgcccgaaaaacaagtcaaggcgattcacaccattcacgatgcgatgcaacgcgtggttagtgacctcgttgccacctttgatcctgaaaaacggcacttgttgattactcattttaccgttacacccaaagcagatgacgacttggaattaacaagtgaaacaacttccaaagtgggcggtttggcgacgctgaccaccgatttattcgcagacttcgactacgtgatgctgggccacattcacactcggttagcctcacccgacaaagatcgaattcgttatgccggtagccccgtcaaatttaacgtcaaggaagccaaccctaagttccatggcaaaggtgttgaaattgtgacaatcacacccactgcgatcacccatgaattcaagccaattcagccgcaaactgacttggttacgttgcgtgcgccttgggaaacgttacttgatcccaacttttatcagcaacagccgttaaagcaggcttggtttgcgatcaccgtccaggaattcgaccgtagtaagcatctgaacgtccgggcgcaactcgaacaaatctacggcaccattgtcgaactggactacgaatcgaaccaccaagccaccgccattagtggccccaaaaacatgaacgaactgagtcctgatgcaattgttgggcaatttttccacgcgattactggtaaccagctctcaacgacacaacaacaactcgttgaccagattttcgtcaacttaagaaaagaggattagccgtgaaacccgtttatttagccatgaactattttggcccccacgaacattcaattattgattttagcaagctagaaagtaccccgatttttctgattagtggtgatactggggccggtaaatcaactattttcgatgccatgacttttgccctctttggcagtacgacgaatgatgggacggatggtcgggcagccaaagagatgcgcagtcagttcgcccccgctgaccaaccgacaagcgtcaccttctactttgagcaaggcaatcaactctataagattgcgcgctcccctgaacaatacttagctaagaaaaaaggatctggactgacaaaaaagaatagtacggccaaattagctgtcgttgatcacgttggtggcgtggagattgagagcattgcaaccaagccggccgacgttggtcccgagatcacgaccatcttgaatttgactgctgatcaatttaaaaaaatcattctactcccccaaaatgacttctcggaattcttaaagtcaaaaacgactgacaaggaaaaaattcttaaaaagatttttggaacgcaactttattcagactttactgcggaacttaaagcggagtatcaaaccgccagcaagactggtgatcagtttgtcgccgatttgcgggtcgcactagcctcagcaacttggaatgatgcggaacaggctcaacttcaagcagttccggacgatcaaaaaattccactactacgagcatttgttacgacgcgtcaaagtgcttttgaccaagcacagcaaacgactagtaaaatcaatcggtctgttaaagcggccgaaacgacctaccagcaagcacgcgatcgccaacaacaatttgaccggctcacacaggcgcaagctgattatcaaactaaagttgaagaacaaacaccggcaattaccatagccaagcaacagttgcacgcgttaacttgggcccagcccctacaagccaccatgcaagccctcactcaacaaacacgtgaccaaaagcaattgacgcttgaccagcaagcagctatggataacgtgcaacaagcgcaggacgactatcgccaagcgcaagctgcagttcaacaattacatgaccaaagtgaagctaaccatcagcaccagcagcgcttggaacaattggccacgttgattccacaagcgcaacgcgttgaaagtctcatcgcacagctcgcaaagctcaagccgagtgtcgctgatctgaaggcgacttttgaacagcaccaaaccgtaataaagacattaacagccaaaatcaccacccaacaagcgaacttgccatctattgatgacttacacgccactaaagatttgctgattaaacaacgagaacagttcgtcgacaccctgacaccacttgatagtcaatggcgaggtgcgcaacaagaacagcagcgcgtcaccaagcaactgactgatttacgggcgcagcttgcccgcgatgaacagaatcagcacaatgcgcaagtccaatttgaacaacaacgtggtcaacgccaaagcttaatgattgcccaattacaacaagaactcgttgacggccagccctgcgtggtctgtggatcaaccgatcattcacagatgccggtcacaaccatcgttgcaaatgaagctgacttacgacaatccatgcaagccgttgacgacgctcaaaacgcgctggcggcagccaacaagcaagtggaagcaactcaacaacgtgtcgaacaggctgaaaaagaagttgaccaggctacgcagcaagtaaccaccgcccaaacgcaactaacttcaacttaccaacagttgattgaaaccaacggactagcactaaagtcaccctacgatttgaccgcagtcagggcttttttcgctgagcaactcgccacaattacgaagaagcttgaggcagcccaacgagtggttcaagctattgagaaatatactgctgaactggaagcacaacaaaaacaggcccaacaaacggagttacagttaggcgaacaacgggccttattgcacaataaaatagccgatttgacggtagctcaggcagccattggtacggacttacaagtcacaagcgctgacctgctggccgaaaaagcgcatctcaatcagatcgtcgcgacctaccaacaacgcctagaggccgcccaagccaccgttcaaaccagtcaacttactttatcaaatcatcaaactaagctcgatgatttaaacgaccggttgaagacaacacaggccacgcgcacgcagcttgagcaaacaatcgcacaggccttagctgacccagaagcaccgactcatgaccaaactgtacttgaaaattggttagaagaactcgccaatggtcgactgaccgacctgcaagtccaaattgccacctatcggcaagacaaggagcgtctgacaaccgaaatcaagcaactgcaaaccgccttaacgaacgttgaacgaccgaatattgcgggcatccaagctcagctggccgacctgcaagctcataaggatcgagcactgcaatcccaaaccgtggcggaacaaaccttaaccgacgcgcaaagttgtctcgaaaaagtccaacaaatcatgcaccagcaaggcacatttgcaaagcggttcgccgaaattacaagcctgtataatatcatgactggtaaagatggcaacgatcacaagctcaagttagagacctacgttgtccaaaactacttgcaacgcgtcttaaactacgccaatgatcactttatcaacctgctttccaataaccgctacacatttgaactagctgccgaagcgagtgataaccgcagtgaccacggcctcgatatcaatgtttacgataatgagaccggcaactcgcgttcatctaacacgttgtccggtggtgaaaccttcattgctgctctgtcgattgcactctcgctcagtgaggtcgttcaatcttcggctaatggcgtccaaatcgacgcactatttgtcgacgaaggcttcggctccctggatgatgaaactttggaaaaagcgatgcaggcactcgaaacaattggtgaaaaccgaatggtcggtgttatcagtcacattgaatcaatgaaacgaacgattggccaacaagttctcatcaaaaagatgggggatggccgcagtaccgtgcggttgatcagtaaatagccgccgaaaacaaccgcagtacatgactcacaaggtctgaaaaacagcgacacaaaaaacggcggccgtcattcagcaattatgctggatgacggccgctgtttttgtgaaccatcccaattaatcagaccggattaaaagaaaatacccaggatcagtccaagtaattgcatgccttgaaacatcatcaaattttgtggtgccgtattaaaggtggtttctttcacctgcaccgcgttaaaggcccgaatattcttcaaaatttttggtaaaacgagcaacactgccagctgataaatcggtagtatttgtaaaacaacactcatcagcactggcaaataacctaacagcgccagcgtatcgtagacccgtagtgaccaacgatgaccaatatagtacggaaccgtataacgttcattgcgaatatcctgttgtaaatctgaaatattatcagctaacatgatattcgcaaccaagaaaatccctggtagccccaccaaaatcatgaccaatatgttctctaaattccccacaatcgcaaactgcggccaagcaaacttaaagcccgccagtacgggggtcgcgacgttcatataaacactcagaaagaaaacgccaaatccttcgacacatcccgacagtaattcacccaacgggaagcgcgaaaacggtaccgggccataggtatagaagatagccacaccaatcgctgcagcgcccatgaacagtaacaataggtttgttctgacgactagcactaatcctaaaataattgcagttgctaacatcgctagcatcaaattcaatgatcgtcgtggtgataggtgctcacggccaacaatgttataagtatcccgataatgtaaatccttagccaagtagtaatcctgcacgttattaaaccccgtcacaaacaatgcaatcgctacttgtgcaactaagtaaattaacgaattgatccaattaaacgcatgaaaataatagattgaaaataaaataccaataaaatacggcaccacactagctgccttggcatttagccgaatgaattccaaaaaaattttgaacgtcattggccgataagttggttcgttcgtcaacaacttcgccccctgattaaattaactactcttccactataccaaaaaaggttacttgtgaaaatggtttcatgatgaacataccaacaaatatcggtcagcttaaatatatttcgagtcggatcaatctgaatcaggattaaacccagcctgctggtgtacaacctattcgtcgtttaatcagcatcttactgcgccctatcgaactgtcagtcgatgctcaatattgatccaggcctccctcaaaatcacgatatgatcccataggccgcggctttaaaattcattacagcgcaattatccatactgaaaacgcacattcaagttaaattaacttgaatgtgcgttttaaattcatcaatgattcgattacctagtggtcgtgctcatgatcatccaagggcgcttcatcttcatcacgagtagctggtcggattccggctggcagttccgacttggcaatcttttcaacatcattcgtttcagcctcggccttagctaagagcttcgcgtcccgtagaatcggtaactggaaccgaaagatcgagccctggcccaccacagattcaacactaatatgaccatggtaaccttcaactaaccgttgcgcaatggataatcctaacccgttaccacccttatcacggctacgcgccttatcaacccgataaaaacggttgaaaactcgatcgagattgtccttagaaataccctcgccaaagtcttggacggcgacttcaatgtagcgataatccgtggataatgataaatggatttctttacgtcgtgtcgagtacttgaccgcattatccaataaaataatcagaatttgctcaaggtgattacggtaaatctgagcatacaccggctttttaacatcatcatcaaacgtaaaatgaaagtcggggtgaatcatcgtaaaatcgttaaatgcttgcgtcactaacttctgaacgtccgacgtctcatggctaaaattgatttccaattgttcagcacgcgataagtccaacatttcttgaactaagctctgcattcgcttggtttctgacaaactagccgccaatgattccgacaacacttgcggatcatccttgccccatcgattcagcaactccatatggccctggataattgccaccggggtccgtaattcatgggaaacgtcttcaacaaattgctgctgttgattaatatagcgttgcatctgatcaagcatatcattgaatacgactgctaaatccgacaattcatcattgcgtttaagatcgggcactcgcgagtcagtttgcggatcatcattgaccgcattaatcgtctgtttgattttacgcattggccgtaatagaaacgcagctaagaaatagcccagtagcgtggcaccaaaaatagtgatcattgtcatcacaataaagatccagatcaaattctgagtcgttgaatggtattccgccaaattatcggtgacctgggtgtaaccaatcaaacggtgattgctagccgcataaatgggcgcccgcccaactaattcagcatcacttcctcggccaatcaccaccacctgacgcgtcttattcttagagaactcatgtgcatccttgcgggatagatagagtgtgttcccgtgtggatcataaaccgtcacagctaagtttgtacgggataaggctgttaaatcagaatctgaaaagattttactttgcagcacaccatgcttacgttcactcatggtagttgccggttcaacgctcgcttcgggttgcaatttagcggccaccgatttaatggtcagtcccttcgactccgttcgtaacgattgttgcaccgttgtaacagcactagccacgttccgttgttcttggcgcaataagaggttcgtgaaactcttatagaccaataatgaaaaacaaataaaaatgagcgcggacccaattgcggtcccgagcgcccatttccattttaatgaccaacggcgccgtggtttaggcgtcacttgattcgtatcagcgtcagtcattaagaacgaatcacgtatccagtcccacgaacagtttggatgtaactcttttctcctggtcggtcaatcttgttccgtaagtaacggatataaacgtcgacgacattcgtttcaacttctgattcgtaaccccatactttgtttagtaagacatcacgagcgaggacaacgttaatattttccattaaagttaataacagttcatattcacgcttcgtcaagttgatgacttcgtcgccgcgtttaacgactaagttttccttttcaatcgtcaagtctttataagtgacggtcgtttgtttagtgctttgttgttcactttccaaatcgattcgccgcaatagtgctcgtaagcgggcaagtaattcttcgatagcaaatggcttaacaatgtaatcatctgccccatgatccaggccggaaactcgatcaatcacggagtcacgggccgtcatcataataatcggcgtattcttgacttcacgaacccgccggcagacttccaaaccgttcagttccggtaacatcaggtctaataggatggcatcaaaatcttcagctaacgctgcgtctaaccctttacggccgttatattcgacttgaatatcatagccttcgtgttttaattctaattcaacgaagcgtgcgaggtttttttcatcctcaataattaatattcgactcatttacttttagtcactcctaatattcaacttatctaaaaaccgtacgaatcagtgatttatcaccactaacctgcattaagctagtacaacatgttattttaacatgaaaacgctgaatttcctacaccccaaccagggtctgctcctcacccaaatctaattttagtgaattctcattaaattgcaatctttatgtctcatcatctgacggttcggtttgcggatgttgctggtgccactggcgaatagcagctaggcgctgttgccaggctttctcctgtccctggctagtcggctcatagtaccggtgctgttttaactcaggtggcatcgtcgtcatcgtggttaatttggccgctgtatcatgggcatatttgtaatcagaaccataacctaaatctttcattaattttgtcggtgcgttgcgaatctgtaaggggaccggtaaattacccgtcgctttgatatctgcttgcgctgccgatttagccgcgtataatgcattggacttcggtgctaaggctaaataagtcactgcttccgtcaaattcacgtcacactcaggcataccgatcaactggcacgcctgaaagactgctaccgtcagtggcaatgcctgccggtcagctagcccaatgtcctcactcgcaaaccgaatcaaacgccgagcgatatacagcggatcttcaccgccggctagcatccgcatcaaccagtaaatcgccgcgtcaacatcactattacgcattgatttatgtaacgcggagataatattataatgctcctcgccatgcttatcgtagcgcaacgacttagtattgatcagttgcgataacccggccgtagtaatcgtaacgtgcttgccatcgcggtcaccgttcaaaacagccatttctaacgtattgagcgccatacgagcatcaccattagcaaattctgcgatcaaccgtagtgtatcaggctgcatcgtaatctcaagatccggaaaccccttcggattctgcaaagcgccctgtaagacagcttctaatgcgtcaggcgtcaatgcctttaagaccaatactttgcaccgtgataatagggccgcgttaatttcaaatgagggattttccgtcgtcgcaccaattaacgtgatactgccgcgctcaacatatggcaaaaaggcatcttgttgggctttattaaaccggtgaatttcatcaataaaaacaatggtcttttcaccaaaatctcgattagcctccgcttcatccatgatttgccgaatttctttaatgccactcgtcaccgcgctaaacgtaataaagtgcgactgggtctgttgcgcaataatttcggctagcgtggtcttgccgactcccggtggtccccaaaaaatcagggatggtaactgatcttctgcgattaattgtcgtaatagtttacccgggccaagtagatgctcttggcccttgaaatccgccagcgtcactggccggacccggtaagccaacggactactactagatttatccgggttaaataatgattcttgtcgcatggcgacccccactttcgcgtttattcattactctcaattttaacgcaaacgtacgttctaatccactcaaaccaacgatcattaccgcacagccacccacagcacaaaaaaactgcgcctaatcacgcgtaacgtcattagccacagtttagttcattcaaaatgattttattgttcttcgtaccaactgtaatggtataacccttcacggtcagtccgttcatacgtatgcgcaccaaagtagtcccgttgcgcttgcaacaagttagcaggtagcacttcggcccggtatgagtcgtagtatgacaatgccgcactaaatgatggtaccggtacaccagcttggatcgctaagctaagcacttcacgtgttgattgttgatacttggcggcgatgtcggcaaagtagtcgtccatcaataagttatttaaatcaggcttcttatcaaaagcatccgtgatgttttgtaagaattgggcccggatgatacaaccagcacgccagatttgggcaagttcaccgaacttcaagtcccaaccataatgttcagaagcgaaacgaagttgttcgaagccttgcgcataactcataatcttgctgaagtagagggcttgacgaatcttctcaaccaattcttccttggctggcaagtcaacgtcagcggttgggccagctaatttcttagaagcggcaacccgttcgttcttcatcattgagatgtaacgcgcatagaccgcttccgtaataacggattgtggcacttgaacgttcaaggcatcttcggaactccacttaccagttcctttgttgttcccacggtctaagatcatgtcaacgattggcttagtcttatccgcacctaaatcatccttacgtgacaaaatgtcagcggtgatttcgatcaagtaactgctcaattcgcctttgttccagtccgtaaaaatatcggacatttcatcaacggacaagcccgcgacgttgcgcatgatattgtatgattcatcgattaactcttcatcaccgtattcaatcccgttgtggaccatcttaacgtagtgaccagcaccgttcgggccgatgtaagtcacacatggtgcaccgtcttgaggcgctttagcagaaatcttttccaagattggggcaactaaatcataagcttccttttgaccaccaggcatcaatgaagggccttgtaaggcacctaattcaccaccggaaacacccataccaataaagttgattccggatttatctaagcgggcgttacgcgccatcgtgtcattaaagttggtgttcccaccatcaatcaagacgtcgcctttatctaatagtggtaataattcatcgataacggcatcggttggcttaccagccttaaccatcatgataatccgccgtggcgtttcaagtgaagccacgaagtcttcgatcttataacttggtactaattgcttgtcagcatggtccttaacgaccttttcagttttggcaccagtccgattaaaaatcgcaaccttgtagccgcggctttcgatgttcaacgccaggttcttacccatgacggccatcccaatgacaccaatttgtggtttttcattactcattagtttattgcctcccaatttttaatacgcaactatcgtaccaaaaaacacgctgttaataaagtaaatgaccgcaaattttaaaattaatttcatataatttatcttggaaagaaattaattttcataggaccatccaaaaaggttacttacctttcaaacagcaccaactgacaaagttaaaaacaccgtgctaggcttacagtaaaataaacggataaccttcatagatcggttcgtggtgtttaggctagtgtcctcattgttattctgacgttccgcactttttttattcgtacatgcccgctggtggccacttttaccagagagacaccctagcaccactaatcctgaccagcagtccaattcaagatgcgtaaggaggcccctaatcatgtcgatccaacgactgccagattggcatcaaattgaacagcccgttgtcatttcgcttaaaacggcccgtcaccatctctggggcaacgtgaccgtttatttgggcttatttattatcgagcttctaggggcacgctggggccactcacaggccctacgtgcggatgcctttaataatttatctggaattttttcgaccgggctactcatgactggtctattcatcgccagtcgcacgcacgatgacgatttatttggcgcacccatcgcacccgcggagcagcagcaattaggaccccgaatccagcaatcccgctttcgttttgagacgatttttaatttactagccggcaccatcatggctgccattggaatcgacattattatcaaaggcgtaatgacattcgccacccgtacccccttcaaaaacctcagcagtatcgccggcttggccgccgggttttccttcgtggtgctactggtcttatgggccttcaatcattattggagtcgcaaacttaacaatgctgccctgaccgcagcgagccgtgataccttcacggacgcgttgaccagtctgactaccgttcttacgatccttgtcacggtcaagctccaccttcagtggttcgataacctgattagtatcggcttagggctatacatcctcaatactggcaccaaaatttttcgagaaagtagtctgaacctagttgactatttcgacccttaccttgaagatcgctatcaacggcgaattgctgatttaactagtgtccgcaaagtcatttttctcaaggctcattatgatggtaatctcatcatgctgcgagccacgatcgttgtgccacctcggatgacggcgattgaaatcacacgtctgattgaaaccatcaatcaaatcatgtggcaagaattcggtgtgatggaaacggacgtgatgattacgactagctattgatcaaatcagtgatttacaaaataggcgatacgtttagccggctgaccatttcaagactagttgctgacaaaatgaggctacataccgccccttttcaccagcaaccacgtggtactaatcgtcgtgctcagtttccaaaatatgaccttcataggcatcaatcttaatatcgacttgctgctttccttgatgtacctggacctcccagtaagtggtgccattgtccttatcgagcttgagctcgctagcatagccaccgttacggtcatggatggcaatcgccaccgctttactaggactgattaccttgttaagattcagccggtcaccctcagcgtcagcttgatcatcttgatccagcatctcagactgcttactgatgaccttcccggttcgcccattgagttgtaattcatgttcctgggtgccgccaacgccttccagcgtgtaaaccggtcgaccgagttggtcttctaactcaatactcgtcacactggcgtccggatattgttgctgaaactttttgatggctgcggctaatgacactttcgttttggctgtcacacttttggtcgaactactttgactgctagtcgattggcttgtcgccttattttgcgtcgactgttgggtgccacatccagctagcagaaccacggtgagtagtgctaacccgatcccatattttttgctcatcatctccataacccccttgtcgctgcgtcagtaacacttattatgaagccgtactcatatttgatagtcttagtatacggaagggagacgcctcatcgcaatcaatatgcaaagccactcgcttgaccgcgctggcagttcagtcaaaccttatttcaagaagtgctggtcccaactcaaacttaattgaagacaacaaaaaaagcccacctaagcgggctttttgatcgtattatggtaacaaaaagtttcatgcgccatggccgcaatgcaacttttcaccaactaacaattagttgtttacttttacgacttgcttgccgttgtagtatccacaacttgggcaaacacggtgtgatacacgtaattcgccacaatttgggcatggtgccaaatttggtgtagccaatttaatatgaccacgacggttgcgtttacgcatcttagatgttcttcttgctggtacagccatcaacctacacctccttcaagtgaattcacataatgtgtgttttgatacgcctagctaacttaatccttgtcttcctgatcagggaacaggttttttaacttagctaaacgcggatcaacagttttaagttctgcagcttgcaacgcttggtcgtcctcggagagaacttcccagcccttaccagttggcattggggcgccgtcttgttcagcttcagaaagaatctgcatggggatgtgaattaaaatattatcctccacagcgacatcaaaatctaaaatatcatcttcaggtaaaataattaccgtatcagtttcttcatcaaaacgactcagatcggttccctgaggaacataatattccgtcatttgaaaagccaatgggacatccactggcgtcagcgagcgactagacggcaatgttaacattgcgtcaatcttcgccgtgattaacacattatccttatcataactcgctaacccagttgcgtgaactgacttaacatcgataatttctggataacggctcatcaaggagtgttttaaatccaatgcttcatcaaactgaagtggcgtttcacggtatgttttaagctgtgaaagtgaccatttcatttaaaaacctcctaatgcaacgtgataaattatacctgtgtaaaaatcctttgtcaatgttttttccttgacagtccaaaatgcccgtcattagacctaaccatatcaagaaagcccgccgcggtcaaccaattgttaccggtaaccgccatggttgtcgatataaatcttgcgattgcccattaattaattgatagacgcgccccgcccgataatcgagattcagagcatgctggcgtaagtcttgattgattttcgtatacagcggcaacgggagctgtttcttcacttgatgcaaataagcctgccccttaggtgtgaagcctaagacgcgcagataattatgtgcctgtgctttctggacttctgcctgagtaagttgtagtagtgcggctgtcgccacccgctgcaatcgtgtatacgtatagcgttttgacttgacctgatgaataaagtcatcaaaagtcgtggcgtgttgggccatcgcctgcatccggtattccaagccttccgccatctgatcatactgtccactacgggcaacgtcaacggtcagcaattgatactgtaaaaacggccaaaagtcgctccagcgctgcagtcgttgcgtagtcagcgccgtgaacgtgtcggccgggacaactggtttcagcgccgcccaatcctgtgcaagtgccgcttggcgcaccgctgtcccactggcgtagcgactatcggccgcaattgtcgtcgtcgcgtgatccgcttggcgacgcttgatcggcagtaactgcatcggatgtgccagggtctgattggcagcgtaataacagaagctcagcatatcattggctgccgtcaacgtcacgcccgtggcagcttgcaaggccgcgttaaactgagtggcaaaagtcgcattatagtgggtaaagctgccctgccgcgccgcaattgccgtggccaaccgttgaaagtccagctcaggatgttccgcaccaaaaacaacactcgtacagtccagtgcactgagtagttcaataccaccccgtgcaaataaatgggcaggttgggttgcaaaaaacacgggcagttcaattactagatccgccccattttccaaagccagcttcgcacgtgtccacttgtctaaaatggccggttcaccgcgttgcagccaatcaccactcatcacaacaataacacagtcggcattggtcaactgttgtgcttgccgcaaatggtagcgatgcccattatgcaacggattgtattcagttattaacccgactgcttgcattcttgttcctcctactacttacgacacttgaagaaccaccgcgtggtctgatcatccggttgttggcggccaaaatcggcgctgaccgtgacatgattaaaaccggctgcctgcagagcttgttgataatcagccaacacataagtttgttcttgatgtaattcactgacctcgtcgaaggcctgcttatcatcattataaataaagaacgttaaatcgtgctcagcactgtgcggctgttcaccggcatagcttgtccacataaaagcccgatcctcatcgcgataattgtacatataaccaggatagacctcatccgtctgataaggtgtaatgacgtcgaataaaaattcgccggccgctgtcaaatgttgagccacttgttcaaatgcacgttggactgtcgtaatatcgggcaaatagcagaacgaatcagcaaaacaggtaaccgcatcaaaggtcccaatttcagataaatcgagcatatccccttgtaatagcggtaaggtcacggctgcctcgtccgcatggcgctgtgccagtgctaacatgttctccgacaaatctaaaccggtgacctgatagccggcttgggctaacaacacccctaagcgtcccgtcccacaagctaattcgagcaactgaccatcttggttaggatactcacgacggacaaaatccagccattgctggtacatggctggatcaaaaagttcgtcataaagttcggcaaacgtctgataaatcatgcatttacccattgtgcaacgtcgacgatgggcgcatcagaccataatttttccaaattatagtgtgcccgcgcatccttttggaagacgtgcacgatgacgtcaccggcatcgatcaagacccattcgcccgcagtccgaccttcgacgctcttaacgtccgaaccggccttgcgcacaaagtccacgatattatcagcaatcgcttgaacttggcgcttggaatccgcggataagatgacaaaatagtccgccatcaaactgacttccgcgacgtctaaggccacgatatcgtcggcacgcttatcgtcagcggcctcaacagttaattgtaaaagttccttgctatccataaaactctcccttaaatttaattggcaaattgaggggccacaccgccgacccacgcgttataggttgctaacgtttgtgggtagactggcgcacccttctgaatcagataatctagtgtatgttgaatctggaaacgaacaccgtcagccaacgacttggccgtcgcttcacgagccgcttcaacaccggggaagtcccgggctggttcaataaaatcggccataaagatgatttggtccagtttagtcatataaggcgcaccgaccgtgtgtaaccgcaccgcattcaaaattggctcattgtagatgtgcaactcatctttgatcagttcagcgccaacatagccatgccagaccccgttcccatacgaaaccaggttggggtccatgccatgcgtcttaatgagctgaataaatgtttgatcatcgcgttgcttggcgtagtcgtgtaataaccccgcaattccagctaactcgacatcaacaccgttgtcaacagctaactgccgcgcagtctcctcgacccgtaagcagtgttgatagcgtttgtcagtcaactgggcggcaacttttgccattagctcctcgtgacgatatggaacaatcgcttcagtatactcaatcgttttgctcatacaaatgatgctccttaatataagcggccacggcttctggaaccagataacggaccgaatgcccatggctgattttttgacgaatctgagtggaactaatatcgatcaacggtgcgtcgacccaaataaccggatattgactcgtcgttgggtacccggttcgtttgataccaacaaaggtgactaatttaactagctcgtcaatgtgataccaagtatgcaaataatcgaccatgtcgccgccaatgatgaaatagtactgcgtgtccggatgcttagctttcaaaaacttcatcgtttcgtaagtatagcttttgccaccccgctcgatttccgccgtctccaaccgaaatagtggattatcaacaatggcttcttggaccatattcgcacgatcttccaccgcaatcgtcttcttttcgtcgacatgcggtggttgagcgtccggcataaagcgaacttcatccaaacccagttgatcaccaacttgctgggccatgatcaaatgtcccaaatgcggtgggttaaacgtgccacctaaaataccaacacggcgatgcggaattgccgtcaccgtttccgtcagaacttttgtcgctgtttgattaaccgtctgcacccgtcattcctcctataacttagcaacttccaatgaatagtgctggtcttcttcatgactagctggcaagtataagactaacacccggccaattgtttgaacgaccgtaatcgcggttttctgttcaattgcagctttaacttcagccgttgtcacatcagcattttgtaaaatgttgactttaattaattctcgcttatccagcgcacccgttagttgggtcaaccattcgtcagtcaagccgtttttcccgacagcaaatagtggccgcatgtggtgggcttcaccacgtaaatagtgtttttgttttccacgtaagttttccattaagtttgatttactcctataattttctgtttgataatcgcgaatcagattctactccgaccacaactcatcaacgcttgttgatcatagctgggcgcgtcaagactgcaacaccctttggtgcccaggccgctacacgcgtatccgcagccaccgtgacccatccgaggccttcaaagacaatatcactgatttccgtcactttgaattcgtggcgaactagtggtggaaagtcagcgacagcatcgccagttgggggggtaatcagttcacccacatgcttggtataaaagttgtccgcattctcggtccgggttcggtgcaaggtcaagttattatcaacgtagaccgtcccagttgcttttaacgtatcaacaatatctaaccgtgccaccccacctaagaacaaagtttgaccgttgcctaattggaaaccctttgggcgaatctcgcgttgtggtgagactaacttcaggtcatcgcctgataacacgtgggccatctgttcaggatgaataattccgggtgtatcaaccatcatatgaccatcatccaacggaatttcaatcttgtctaacgtggtccctgggaaccgggatgtcgtgatcaagtccttcaaaccagtattgttggcaataatccgattgatcaacgttgacttaccaacgttcgtgacccctacgacataaacatcgcggccacgacgatatttttcaatcatcgccaagagctcatcaatggaatgccccttcttggcactcgttaacgcaacgtcgaccggtttgattccctgtgcacgaacttgttgattcatccattcccgcaatttcgtccggcgtaactgacgtggcaacacgtcttccttattaccgactaacaaaacgggattatccccaacaaagcgctggagaccaggaatgatgcttccattcaaatcaaaaatgtcgacaacgtacacaaccagtgcgttcgcatctcgaatcgtggctaacaaatgacgaaaatcatcatccgttaagccaaccggcacgatttcgttatagtgccgaagccgaaaacaacgttgacagtataaatcctgtgcgtcactagctaatgatttttgtaacgcactgttcggtgtgtagccggccgccttaggatcggtcgtttgaatcgccgcaccacacccaatacagtataaagtttcttctgatgtttcactcacttattaaggtcctcctgaaaatgcatttctggataaacatgtgctaatcgtaatttgataaatcgttcaaagaaacggtttatccgggtattccacgcgtccgtcttcacgattggctggactaagatactgggcacgcccgcaagatgggccgcccacatgtcggtgatatactgatcgccaaccatgaccacttcatttttgtgtaagcccaggtcatgacgcgccttactgatccccagcggtagtggtttcagtgaccgcgaaacaaatggcagttccaggctttgcagcgccttagcaattcgcgcttcggaattgttcgacaccaccactaacggaatgcacgcgtcttgtaacgcgtgcagccactttttcagttccggggtgccatccggattgtcccatgcgatcaacgtgttatcaaggtcggtaaataccgccttaatgccctgcgctcgtaactgcgccggtgtcacattgtagattgctggtatcatccaagttggtttaaattgcttaatcatcgttatccccttcgcttctcgctggattttttggttattggcataaccccactagcccattttatcatactattggtgaaataccggactaaatcaggtctggagccggatttcactaggcaattgtgctaaattttagtcatcattatataataatttgttttttgaaaataagcaacgaaaatccttccaagttgtcgtaacttgatgacaccacctggatcaaatttgactaagttgatcgcacccgcatttatttgataggttggggcccgagtaagacattgaaaatagcactaaaagtcgccagtaaattcagcgatgttttgccggttgcccttttctcgccagtttatttgcaatggctaaaccacaagttgacattcaattgtcgcactgaccgttttgtcaaattagattaacaaagtatcccattaagtgtatattaattaaagatacgtggcttttacttatatcatgatactgatatgtatattgattgcacatcaatgcaatcctcatgtaagcttattgacatggttaaatgttcagattgttctaaaactgttcatcgcagttaatgttaggcgccctggtgttgttctatgtcgataaactgacaatatcagtaatgatataaactatatgatccgcacgatcactaaacaatatgtcatctcggaggttcgtttatggagaaaaaagatgttatgaaacaatacgttaccgataaatatttttccaaggggcactggtggacgaaactttggcaaaccctagtcgcaattattacttggatctgcgttgccgtacctgtctactggactatctcgtcaacgttacttgcgaataatccccagttcattcacgcctggaaatacgaagaaggtaagacgctgttctacttttttgaccggttctttattattgcgtttaacttaatcgccattgtggtcattgtctccacgattcacaataatcaccgggtcaagcagcatatcagtaaagaacggcaatacaacgaagaccagttagatattcggaagcggcaactaaataacttttatacccaacgattcgggcaggccactttccggcaacacgtcaagcactacacggttgaccccgaacaaaatctcgatgttaacgaaatccacagattgtatgaggactagccaatggaaataatgcaaacacttaagccctttgaaagtatctggaactttgttctattactattagtctcctacccaattctcggtgcatttgcctggtttatcggtgtactctgctaccagctgatttaccgccatcgccacaaagacgatattgaatttcaaccgctaacgcctgaagaacaaccctttatcacgatcatgattccagcgcataacgaagaagtcatgattgaacacacaatcaactatttaatgaacaatttaaattatgaaaaatatgaagtgctggtcacagacgatggttcgactgatgagaccccagctattttagaacgtctccagagcgtgtacgacaacctacgcgtggtaacaatcaagaaaaatcagggtaaggcccacgcgttcaacgtcggtgtcggctttgcccgtggtgaattcattttaagtaatgacgctgattccattccagaacccgatgcactgtggaaatatatgagttacttcatgggcgaagaacacgccaatacggcagcggtcacggccaacatggacgttcagaaccgaagcacgatcatcgctaagtcgcaaaccgtagaattttcaagtatcgttggtgttatcaagcggagccaagtcagtgctttaggtaacatgtatgcctatagtggtgccaatacaatgtaccgtcgtgacgctctgattgacgtcggcttattccggcaagatcgcgcgaccgaagatatcagtattgcttgggatcaccagttgaatggttggacgaccgttttctcgccagacattctattctatatgaacgtccccgagaatctagacgccctttatcatcaacgcaaacgttgggccaaaggtggtaccgaagtgctgttgaccaactttaaacgggttgtcagtcatcccggtaagtatttgaagcaatgggcttttattactgatcaaacgctgagcatcatctggtccctattcttctttgtctcaacactgatcttcctgatctcgctcgtcaccttcttctttactggcaattacgagcgcgtctatcatatgttctgcatggccttcatcttcgtgaccttcgaaatgttcgccggcgtcttgcagctattgtccgcattgatcgttgacgaccgtggccgcaagtttaaatatctgattttcatgccactctacatgctgatttactggcaggttaacgccctcgctctggtcactacgctgattccagccgttaaaaccatcctgggttacggcagcggcacctgggtcagcccagttcggaagcaccacactgaataatcgagaacacaaagtgagccttcaattgaaggctcgcttttttgttgtgcgggactgtgtggagacggacccaaccttgcatgtgcgagaataggctagttagcaacgatttgagcgcttacaattttactattcttcatgtatacgaaagtggtgttataacagctacaatcacacgtactaaatagatcaaaaatcatttttatccagttacctgcaccctcctaccgcctaatcgatggccgccgacgaagtatcaacgctggcttagttgcctgtgcgcgttggacggttgctcgagctagttcatactgtgcgtcaataattcgttcagaatcatatggcgcagcatcctgagccaccgacaattcggtgcagccgagaatgacggcgtcacaatcagcagcattcaataattgatcaattaagccatgaaatttgacccgatctacaaaatcacgttgcttgatgtcgtcataaattaaggtcatcacttgagcttgctgctgcttattgggtatcacaggaatatgtccattagaccgaataagttgttgataaagttgcgactctagtgtccccgttgtcgctaaaataccgattcgtaacggtcgcggttgctgtgatcgacaggctgctgttaccgctaaggccggcatattcaaaattggcacgttagaaagcgccgtcaatgcgggaatgaagtaatgtgctgtgttacacgtcatcacaataaacatgacccctaattgattaagtagctgcacatccgcttccaatgatggtaacgggttggcacagttatgatccaaaatatatgcggtgcgatctggtatctcagcatcatttaaaatgacgtagtttaaataatcctggtcacgatgggtaacggtcagccggttcacggtatgcacaaagtcctccgtcgccattgttcccatcccaccaatgattccaaagcaatttttcataatggcacccccatttagcgaacgagattcacggccatgctgcacttcattaagttgttaataattatctaacatgcacctcctaacaagcaactaatccacaacctatctcagacttaatacggtatcattgcttactgcaaacccatgattattcaagaaatgctgccaaacagtgatctatcggtgtactttttacgtcagactcccgttttattagattagaaaacaactaggctagtaaagaatcacatcaattctttactagcctagttaaacagtcactattaatgcgagcaaggcaccaagcacaatcgcccctaacaaaaccgacaacaattccttgaaactcacactatgcccgttctcacattcctattgacgaggttttccattcactgaattatactgtcggccccacgtctccatagccataatcaccggtttcaaggtctgaccaaatggcgtgatccaatattccgttttcggtggcacgaccggataaactcgttttgcaatcaccccgtcttgaaccaattcttgtaactggcgagctagcatccgccgcgaacaacccggcagtcgtttttgcaaaatgctgaaccggcatgttcctgccgtaaataaatgatacaaaatcacgctcttccacttgccggcaataacttgcaaggtactttcaaccggacaacccggcgtacaatcgtatacttgtcgctgcatctaacttcccctaccttaattaagtgtcttgattgtagcacaactaataggcgtgacaaatatgtccctatgtggcaaataattcacgtcttgtttattcctcactggtaacctatagtaatgtcatgaaaggggtttgattaataatgcatgcaattggttttaccgaccacttacctattgaagatcctgctagtctacgagacgtgacgattgcaaaacctagcgctcaaggtcatgacttacttgttcaagttcaagccgtcgctgtcaatcctgttgacgttagcgttcgtaaaacggggcatgagcacctcatgcgacccaagatcctcggttgggacgccactggtattgtgaccgctgttggagaagctgtcaccctgtttcaacccggcgactacgtcttttatgctggctcatttagacgtcccggctgcgacagtgcttatcacctggttgatgaacgccttgtcggtcacgcccccgcgacattaacaaccgctgcccgtgcggccatgccacttacttcgctgaccgcatacgaggcattatttgaacaacttcacattccttttgacccagctaaacctaattccgaaaaatgcaatcaaaccattctcatcatcaatggcgctggtggtgtcggttcaattgctactcagttagcaaaattagcggggctcacagttattagtagtgcttcacgacctgaaagtatcgcttggacgcagcaacacggcgccgatttagtcgtcgatcatcatcatgatttggttagtgaagtacatgctttaggtattaaagatgtcgattacatcctcggattaagcgatcttgacagtcactggaatgagatatgtacgctcattaaacccggtggccacatcgcatcaattaccgaaaatcggcgtccaatcgaccttaaaaaactaaccaagaaacgcgggacatttgcttgggaatggatgtactcaaaatcctactaccacacggccgacatgattagtcagcacgatatcttagaaaccattgccgatttacttgaccgtggcttgcttcaaagcacgctatcgcagacactacggccaatcaacgcgcttaacttgcggcaggcccatcaacttatcgagcaacatcatatgattggcaaggtagttattgaaggatggaaatgagttgacgggtattacggctcgcgcgataatgatcaactttaactcgccaaatacgctgtccttttctgtcttttagtgcttacaactgatgttgcactccccgggattcgtttaatctgttttccgtatacacggggggtaattccaagctattaatctccccaagctgactcaataccatctacgaaacaatatcgcctttctcattcatcaacaagcatgaaaacttaaatcaatacaccttcaacccatcactcgagccaacgtcaaacctatggtatcagactcactcatttcagcatcgttccccgctaacctgccaaactttctttttcagtttccaaaatattagtgctatgatgatagcatcaatttgactaaaacacttaatcagaaaggactttgaaattggcatttaaaacaccactggctgatcaaatgcgcccgcaatcactggaacagatggtcgggcaacaggatctgttgaaggcaggccagccattacgccagattattgatcaacatgttaatattcccctcattctgtgggggccgccgggaactggcaaaactagtttggcgcagattattgcgagtcaagacgattatccattcgtggcttttaatgcttcgaccgaaaataaggcacagctgacgaaagccatcgcacaatacccagagcaatcgtttgttctattaattgacgaaattcaccgaatgactaaaacattgcaggattttttgttgccctacttagagaatgggcacgtgatgctaattggctcaacgaccgaaaatccgattatgtcaatcgttccggccattcgttcgcgctgtcaaatttttgagtttcaaccactgagcgatacagatatcgagattgctttacgccgtgcggtaaccgacatttacaacctaaccgacgatcaggtagatgctaaagccctcaacctgatcgctatttcggccgaaggggatctgcgaattgcgttaaatatcttggaaacgctccacgctattgaccagaagcaaatcactgttgctgcggtacaacactttgcccagcaacagcattttagctacgaccggaaggcaactaagcattatgactatctgtcggcttattcggattcgatggctggctcagatactgacgcggcgctctactacttaaccattttgttaaaaaatgatgacttaccctcagtggtccgccggctacgtgaaattccatacacttatatcggcttagctaacccggaacaggtcacacaaattgtggtcgctgccaatcaagccgaaaagattggcatgcccaaagcaaaatatccactaatgtttgccaccatgctgatgtgcatttcacccaagtctggttcgtttgaccaatcttgggaaaaactagaccaggacacacaaaatccaagtcagcaccccatgccccgtggattgcgcgatatgcactacaaacactccgaggaaattacaggtggtggtctgatcgataatccattccaaatgccacatcagattgcccaacaaaactacatgcctaaaggattggctggtcgtcgttattattaccctaaagataatgaaaatgaacgcaaactcggtgcacaatacctaaaactgcatcgctttatttataacgaagattatcacgaatagacaatggcagactggcttaaccaatcagaaatcacactcgattttcataaatcagagtcgcgcactaaatggctcacttaggccgttatccacgtatactccaagcggcatcaaaaaatggactcagtcaaatgaccaagtccatttttatttggcatcatcttttatgaatcagtgcacgccagagaccaagtcaattcgcgtcacactattatgccaaagttcttgggccgtataaacatccttttcgaacaacacgacagtgccatccgattcaatccgagcattggcacccaaccattcccaagatggcattaaccacaaattgcgccgctttcccttaccctttttgggtgaccacgcagaaacatagtcatcaatgaaatgtgtacgcatgtatcgaaactccccattatcaaactcaatctgcaagatgttggcgcccatccagaccttaactgctttaggtaaaactgttgccatggtgacaccccttctccaaagctcccagctaaataattaatcaacacataagtaagcgcttacatcattactatatcacaataatgtgtcaaatcaatctcaagattcagtaaggacgtcaacacaccgaaccatcttgtccaggaatcgtgccccttaatcaagcgtcaaaacaaaacgaccgccacccatacaggatgacggtcgttcaaacattagagcaagccctaattaagttttaaattaagcaagtgcctttttagcagtgtcaaccaatgccttgaaagcatcagcatcgttaacagctaaatcagctaacatcttacggttaacgtcaacgttagctaactttaaaccgtgcattaattgactgtagctgatgtcgttgatccgggctgccgcgttgatccgggcaatccaaagacgacggaagtcactcttacgccggcgacgatcgcggaaggcgtataggtatgacttcattacttggtccttagcaaccttaaattggatgtgcttagcaccacggtaacctttagctaattttaaaatccgtttgcgacgtttacgtgttacagttccaccttttactcgagccatgttatttcctcctagatttaactaaaacgttgtgaattatttttgtaataacttgtggtatgtcttgaccattggcttttcgataatagccgtaccacgtaattggcgacgttgtttcttagtcttaccatggaaacgatgactagtaaaagcgttggcgctcttaatcttacccttagcagttaccttgaaacgctttgcagcagcgcggtttgtcttttgttttggcataatcaataatcctcctagaaattacttatctgtttttggtgctagtactaggaacatactccgaccatccatcttaggataggcttcgaccgtagaaaattccttagtagcttcaatcattcgatttaagacttggcgaccaatatccttatgggtaatagcgcggcccttaaaccggatggagacgcgaaccttgtcaccttttgacaagaacttttcagcatgtttcagcttcgtgttaaagtcattggtgtcgatagctgggctcaagcggacctctttgatgctgaccactttttgcttcttacgggcttcccgatccttcttttgttgctcgaaacggtacttcccataatccataattctggccacgggtggtttcgctttcggcgcaaccaatactagatctaaactagcgtcttcagcaatctgcattgcttcttgtcgtgacttgacacctaattgttcaccatcgctggcgatcaaacgtacttcgcgagcacggatgccgtcattaaccattgaatctttagctatggtaattcacctccgaaatattttagagaaattcacaaaaagagcgggcgcatagtacgcccgctcaaccccgttaatgggaatcaattcatcgttcatctgcccgatgactctggtcaccaaggcgagaagcgggtgcttctgcttttttctcaactccaatatattaacaagaaccacggcccttgtcaacccatcaatcaatattgatgccattggctgttaattatttgcttgcaccacgactgtaatgcttgatttcttgcgtgatggcaccaatgaacatgtcaacggcttcggattcagtccgttcttcaccgtacttccgaactgaaacactcccgttagcaacttcttggtcaccgacaactaacaagtatggaaccttcttcgtttgtgattcgcgaatcttgtaacccatcttttcgttacggtcatcgatacttacccgaacaccttcagctgccaaacgacgacgaacggtttcagcgtaggcaccgtgcgcaccattgttaactgggatgattgttacttgcttaggtgctaaccaggttgggaaagcacccttgtaaatttcagttaagtaagcgacgaaccgttccatcgttgaaacaagaccacggtgaatcataactggacgatgttcttcaccatcagtaccaacgtacttcaagtcaaagcgttctggtaacaagaagtccaattggatagttgataaggtttcttcaccaccaagggccgtcttagtttgaacatccaacttaggaccatagaaagcagcttcaccttcagcttcgaagtaatccaagcccatatcatccatagcggacttcaacatcttttgactgcgttcccacatagcgtcatcatcgaagtacttttccttgttttcaggatcacggtagctcaaacggaaccggtaatcagaaatgtcaaagtcttcgtatacttcaaccatcaaactcaagatttttttgaattcttcttcaatttgatccaacgcaacgaaggtatgaccatcgttcaaagtcatttcacgaacccgtgataatccagttaaggcgccagacttttcgtaacggtgcatcatgccgagttcagcgatccgcaatggtaattcacggtatgagcgaatgtgatggttgtaaatctggatatgtgatgggcagttcatcggccgtaattccaattgttcgccgtcacccatgtccattggtgggaacatgtcctcacggtagtggtcccagtgaccagattgcttgtaaacgtccaagttagctaaaactggcgtgtatacatgttggtagccatttgcaacttccttgtcgataatgtaacgttcgatttggcgacgaatcgttgcaccatttggcatccagtaaggcaagccattcccgaccttaggatcaacgaagaataagtctaattcgttaccaatgacccggtgatcacgttcgcgggcttcttgacgccgcttgaggtcagcatctaagtctttttgctttaagaaggccgtcccgtagattcgttgtaacattggattgctggacttaccttgccagtatgcaccggcaacggataataacttgaagaccttgactttccccgttgaagctaattgggcaccgtcagataaatcaacgaagtccccttgcttgtaaacaacgacttgatcattgttggcagcggcacgttcgttaactaagtcttgttggtaagggttgtcaccaactaaagctaaagcgtcagcctttgataagacttcgcgttcgattggtaaatcttgtttgataattgcagccatcttatcactgatggcttccaaatcatcttcactgacttgtttaccgtcttcgtcaggattgtcggtatcaaagaagaaaccgttggcattcccttcaccactcccaaaatgaatgttagggaataattgtttaaccgcgttagctaatacttgggcagccgtttgccgtaaaacattgaggccgtcttcactatcagcagcgataatttcgatactaccatcggttgtcagtggttggcgatagtctacgatctgatcgttgaacttaccagcaaccgaccgtttagccaatgaaggactaattgactttgcaattgcttccgtcgttacgccggcatcaaattgcttttcagcaccatctgggaacttaacattaatacttgccatatacttgacactctccttaaaatttacccactcaccaaaacaccgcgccgggacgacaaaaaagtccctaatgccagactgaactagcattagggacgtcattgacgtggttccacccgatttttcagtgtcatcaaagacactgactcattagcgctaataacggaagcgttccggctcaattgagcatgttcacaaaagtggtatcttcgtaaacccggtccaagacttccagaacaaggtcttggtctctgcaatccatggtaaacaaagcgtgtcttttgcatctgttttcattaaaccacttttaaactaaaagtcaactcttgattttaagcatcgggattgagtcgtcgattacgaccgaccatctcaatctcactcgcaaggtaacgtacccgttgcatgattcgctgcgctttgactggttcttcatcacccttttgtgagagcgtcaaataaccatcttgcaattcttgcatcgaaaaattagacgaaaaacaagttggcagttcctcctgcattcgatactccagaataacaccgagcacatcgtcccgaatccaagtcgacgaagcatccgcaccgatatcatcaatcatgagaatcggtgcccgtttaatcgcatcgaccttatccgccgacgtattgttactaattgagcgcttcatctcgaccgcaaaactcggaaaatgaatcaaggtcgtattgaaacccttagcagccaacgcgttcgccatcccaccgagtaaataagttttaccgacaccaaatgagccgtagagatataagccccggtgaaaacgcttgggcgcttgtgtataggcatcaataaaatcaagtgctgccattaatgctgtcgcccggtcaccatcttgatcatacgtctttaagtccgccgtctgaatatttttcggcatgctgattgatcgaacccgctgttgcaatgcgtgagcagcttgctgttcttgcatttgtggtgttggctgataagcaatgtcaatcaagtgattactcatcactaatgtcggctgatacccaggtgcttgagttggctcgtgccgcgcaattttacgtttctcttcacaaaattcatataatttagccgctgaacgttctagcgcatccgaagataattcgttttgatgagcagctaaaaactggcgaacatctggatcttggtacacagttgtcattaacgcctcataccgatgattcaagtttttccgattcattaacgtccggagtgtttctgagatattctccatgttttagtcctccttttccgaatttgtctcaagctttgctagtcgatcagcaagctgtttgcgttgggcagcagtaatttgtttaccggtctgagctggttgcttaccactctcagtctgttgctgttgttgggcccactttggcataatctccttacgcgtcggtcgattgttcttgcgccgtgttggtgttgatttcggctgtttacgttgcttcaaatatatcaaagccgcttccggcgtcgtaatgccgtgttgttgccaatcattggcgactgtttctagcaaattacgattaagggcagctaactcccgattttgcaataagtagtagatcaccatgttgatgacggcattgggtaataccccccgaccaattaaatcatgaactagccggttctcaccgctcgtcacaaaaccatgtttctcctgcttcaaagctgataaaaagtcatacggcactgtctgcttagcatacgtcacgagttgctgctcagccgttgagagctgtgctgaagccttgttatccttagtggtcgtcgttgcaaccgttgcttccgtagcgacctgctgactcgaaactgcgggccgttcatagcgccgcgcaatcaataatttcaattgattttcatcaaactgacccgttgttaaactagccacttcactgattaacttagccatctcaatctcactgatgccgtagacccgactttccgtaatgatcagttgccgtgaactcgcaacctgtttgagatcaacatagttctgcttcaaaatttgccccaacagttgccagtcaaagtcatcgtcactgagcacgggcgagtgatcctcggccggttcattggccgccaattgggcgcgcaccttttgcactgaaagaggtggcgtcgtaactttttgactatcaacgtgaaacacatctaagatatttgccgtcacgtctttggcagccgtcaagtcaatcggctgtgctgcaaaatcgccagcaagttgttgataacgtaactcaccgaccgtatctaacaataggacactcaatagatcatccgcaaagaattgtaacgccagtaatggtgcttgtaattgataaatgtacatggcacccaattcatcttgttgataatagctgcgcaacaagccagttgcttcaagtttacgccgagccgctaacaccgtcggcaagtccacatttaggatgccaagcagttccgcgtgactgcgtcgattgctcagctcattctcgctactctgtaagctacgtaacgccgcgtacaagctatatgccaatggccccatcagtggcaagtataattccgccaatacagcttgttgcgccgcactgagcgctggtgcttgcgggaccactaacccagttttgggtgttaagggttcatcatttggcatgttgttcaccattctttttcactaatctttttttcgtttaggtgcgtgggtcgtcttcgctgacggttttgccagtttgaccttatcacgctccatcatatcttggagttcattcaagaagacgtgcatatccttgaattgccggtaaacactggcaaaacgaatgtacgaaatttcgtcaatatctgccaattgctccatgacatactcgccgataacttggcttgaaatttcattttcgcccagtgaccggaccttattttcaacatcatcaacgacgcccgtcatggtttccatgctaacgggtcgtttctcggccgagcgaataattccgcgcaagactttttcacgattgaattcttcgcgggcaccatttttcttaatgactaataatggcgtggcttcgacccgttcaaatgttgtgaaccggaacccacagttttcgcattcccggcgccgtcgaatcacgcgaccatcatcagttggtcgactgtcaaccacgcgggagccattatgatgacaatgtggacattgcatagacttctcaccccttgtaacaactaacaatcagtttttctttatttagtaatagttttcagccattttaacacggctgctttagttttatcaatgttaaccccgttatcaatgacaacgtcagcccttgcgaccttctgtgcaagtggcatttggctgtcaattcgtgcctgagccgcctgttgcgataagtggttacgtgccattaaccgctgcaatactacggctggtggtgccgtcacaaccaacacttgatcacaaacatgttgccagccactttcaaataacaacggcacatctaaaataattgcgtcgggctgttgctggtttgccgcgacaatcgcttcgaacatcgcgtactgaatcggtaaccgtgtaattgcggttaaggcttgtaaagcttgagcatcgttaaaaaccaactggccaagccatggccgattcagccgcccgtctgccagcactgcttgctgaccaaagtgcgccacaatcttttgggtcgtcggttggcctggcccttcaacctgccacgcgattttatccgcatcaacgattggtaacttagttgccagcagcttagaaacagtcgacttaccagtggcaatgccaccagtcaatccaatcagctttgtcatcttgatcacctacaaccgttgttctaacggacaaaaatgggtccctcgctgtgccactttgattttctcaataatcgtgccacaccgttcgcaaggttccccttcacgaccatagacgtgtaagtgattttgaaactgaccggcctcaccaaatgccgttgaaaatgaatgaacagtggtgccgtgacctttaattgccatcgccatttcatcaataatgttttggcgcaatgttgcaatctcatcagtagttagtgaattagcaggccgcattggatgaatcttactcatccatagcgtttcgtccgcataaatgttcccaatgcccgcaatcttactttgatccaacaatagtggtttgatcatctttttcgacttgccaaaagtggccgtcatataagccagtgttaactgttcagcaacgggttccgggccaattgtccgcaatcccgccaccgtgttttcttcaccggtcggcacgagcgtcattcgcccgaacttacgcgtatcgttgtacaacaaatcacgatcatcggtcagatggaagatcacgtgcgtgtgtttaccttgatcttcaccacgcggtacaacattatacttgccttccatccgcaaatgcgacaccatcgtcagaccattgctaaagcgaaacaataaatacttcccccgccgatcaatggtctggatcgtttggttggctaaacgctgtttgaaactatcgacatcattattaataattttcggccaaaaaacctcgatactagcaatcgttgccccgctaaccagacgatttaagccgcgacgaacagtttcaacttcaggtaattcaggcatggtggttccccctattttgcatcgtaccaagtatcaccgtagtggctctcaacctttaacggtacggctaactgtacggcggaatccatcacgcttggcactaatttttctaaaactggaatttcttcttttggcgcttcaaaaatcaattcatcatgaacttgtaacagcatggttgctttcaaacccgcagcctgtaacttatcttgcatcttaatcatcgcaatcttgataatatcagccgcactcccttggatgggggtattcatggctgtccgttcagcgaatgagcgttggttgaagctcttggaattaatatctggcaagtaccggcgtcgatgtgaaatggtttccacataaccttgttttttcgccgtttggacaatttcatccatatactttttgacacccggatattctttgaagtaagcgtcaataaagctgcgagcctgtttacgcgtaatgccgatattttgtgacaagccgtaatcactaattccatagacgattccaaagttaaccgccttggcttgccgtcgaatatttggcgtcacctcttcagctgagttcaaatgaaagattcgcatggccgttgcggcatgaatatcatcacccgctttaaaagcggcctgcatattttcatcatcagtaatatgcgcgagaacccgtaattcgatttgcgaataatcagacgagaaaatctgccaaccttcatgactaggaacaaaggcttgtcgaatcttacgtccttcttccaagcgcaccggaatgttttgtaagtttggatcaacggacgacaaccggccggtttgggtcaacgtttgcaagtagcgcgtatgcactttttgatcagcagaatgaatggcatctaacaaaccgacaacgtaggtcgattgaatcttcgaaatctgacgatattgtaaaatattagcgacgattggtgcttccggtgctaacttttctagaacgtctacggcggtagaataccctgtcttggtcttcttgattacgggtaatttcatttcttcaaacaagatgtgacctagttgcttaggtgaattaatattgaactcttcaccggcttcttgataaatcgtctgttcaatttcactcaaccgttctgtaaactgactgcccatggctttaagtcgactgctgtcgaccgtaatgccggcgatttccatctgagctaagacattggccatcggtttttcaatatcatcgtaaagtttatcctgctcattagctgccaattcctttaataactgtggcttcaaactagcgatcgcggccaatttccgggcgagatgactaaagtagacatcatcatcttcaggaatggcacgcttaacgcccttaccataaacggtctcgtcactcggcaagtcagtgtacccgtgttgctcagctaaacttcccaagtcgttactgttatcatttgtatctaataagtatgaaacgagtaagagatcaaaatcgactttacctagctgaatacccaaacgattaagcccgaccgtcgtgcgtttcatatcaaaaacgtccttggtaatcgttgtgctactcaagagatcagccacagtcggttgcattaataattccacatcccgactgatgtaccagtgatcatccgctccgatggcaaagccagcaaaggccgacgtgtggtagttcggcgttggcatctccaaataaaagtccacgtgatcggtaaattgttgcaattccgtcaggttagctttcgtcaagacggtataatcaatgggcgttgctggttcgtccgactgtaggtgtaatttcttcaaaaatgattgaaagtccatcttctgataaaacgcggccagctggtcaagatccgggccatcataggataaatcagccaattgaacatcaatcggcgcatcccgcttgattgttgctagcaccttagcctgcgccgcttgttcgcgatcctcaatcagatgttccttcatcttgctctgcttcatggcatcgatgttttcataaatgccttccatcgtaccatactgtttgagtaatttaagggcggtcttctcaccaaccttggtgacacccggatagttatccgaggtatcacctgtcaaccccttcatgtcaataatttgtgccggtgtgatgcccagcttttcttcaacgtgcgccggcgtatagtgttccacttcagaaacacctttaacggtcacggccaccgtggtatgctcggtcgtcaactgcgtcaaatcacggtcaccagtgacgaccgtcgtggtgtagccggtttgatccgcttgaccggccagtgtgccaataatgtcatcggcttcgtagtcttttaattcataatgtttgataccatacgcgtctaatagctgtttgatatacggcatttgttcagaaaactcactaggcgtcttagcccggccacccttgtaattatcgtacatggctgttcgaaacgtggtcttacccgcatcaaaagccactaacatatccgtgggttcgactgccttgatcatgtggtcaagcattgtattgaagccataaatggcgttggtatgcaggccgtctggattcacgaaccgttccagttgactatgcaacgcaaagaacgcccgaaatgccacactgttaccatcaatcagtaataatttttttgccattagtttgctccccatctcttaatttaaatcatcatttttatgaaaatccgtcactcagaccattaataccactcgattggcggtctgattcgcagcgcctgtcagtacaggctgaacgactaattatttacccttataattgtaccaaacaattaagtaaaacgggagttcggtccaccgaaaacccgtgaaataactcattttcggtaaattaaaaggattatgacatcttggtcataatccttaataattatcttaatgattagtcgcggcttgagccaccgaagatttggacgaagtagaggaacaagttaacgaagtccaagtataattgtaaggccccagtaacggccaaaccagtcgatgaaacctggtcaccatattgtaaatacatgttgcgcatccggttagcgtcccacatggataagccggcgaagatcaatacaccaatgtatgaaaagatgtaactaatcatggcactttgtaagaacatattgaccagtgaagcgacaaacaacccgattaaagctgcaatcaagtgcgtcccaatacgtgaaatatcacgcttagtcgtcgtcccaatcaccgccatggtcgcaaatacagctccagctgcaacgaacgcaccggtgataacggcacccgtgtataaggacaaggtcactgacatttcaaccccaaagatgatggcaaagagcatcagtaaggtgaagctcatcgctggattgcgtgtcgcgttgacttgaatcccaccaatcatcacaaacatgctgacaatgaagatcatcaagaagatgaatgggtgttgtgaaaaggcggcattaatttgtgcttggaacgtggtcatcgctaagtaaacggtaaaggccgaaactaacacggcgattgtcataaacccatacattttagttaggaaactacggaggccaacttgtgtgttgatggtccgtggttgtgggtcattttgaaaattgttcataaaatccctctttcacctaaaaattgactactcgttactttttccgagttaagattaaaaattgagtttgtgcatcgttactaacgcagactgcgctagtaacaacaccacactagtttgtcaatcatttgcctatgactagccatctcaatcagtcacctcaactttcttaacttaagtctatcaaattagtcaaagaaggtaaaatagtttgtgcctgtgaatttaataagaatttcttatgtctaagtgaattccattcaatcattgtctttaatggattaccgctacattaggattttccggaatgggacaccataagcgtttataatagaacttcaatcggtaggactttttgcgggacatccggggaagattttttaggggcgggcggcgtcatacataacttcttattatttaatgtacaaagcattgattagttttagcatgttggaaactacaataaaacactaaatctagccattgtcttgttaattgttttctgaagcagcaataccctgcaaatatcgttgtcgcaatgcagctaccttaacctcaacaacttgattatgattaatccgtgcaaaagcttctgtttcactcattaaccgcttaatcaatttatccgaaagttgttgcttaacagcattctcggtcgctaagtatttcaatcttggtaagtaatacgtgacatgttcatctgagcaaagcgctaccccatcatctattagacgattacttgtgacgaaatcaccactaattgcgtaatactctgccgtataaaagattagggttaacagccgtaagtaatcatttgcatatcctgatgagccagcgtgctcgacatagtatcgtactctcctgaaataaaattgagctttctcaggctcagctaaccggccatacatgacacccagaccgacataagctagcggtgtgaaaattgtttggtgagccctatccaaatcatcaacgatttgcgagaaggaaaaacaaatatcactggctgttccattaatcaacgaacttagcatgccacataaatagtaatattgcatccgtgaaggtaccgcatcaatttgctcaactttcaggtctaccaatgattgcaggactgattgataatcttccatcatcagtcgtcgctcaatctcatcaagttgctgtcgaatttgggtcactgaattagcctggttttcacttagatcatcaactgtcaatcccagacgagcgcagagctgatttaaaattgctaatgctggtactcgcccacgccgttcaaacttacttaaagtcgcctgcgtacaaattccgtttgataatttgacttgtgaaatttttaaagcttttcgccgggcaataaacttttcaatatccatcgcacaccaccttgtctcacccgttagccatgaatgccaagggcaaccttagcaaaacgactcattttatcaattccccaagcaggttcccagaccaagtcaagttcacaattcttaacaccatccacactcataattgcttgattaatttgacttgccaataaatttcctaatgggcaccccatcgtcgtcagcgtcatcgttaccgtgcagctaccattatcgtctacgtcaacaccatagatcaaaccaaggttaaccatgtcaacgcccagttctggatcaatcacctgctctaacgacttcatgaccgcgtcttcaacgggtgagagggccttatcctcgccaagttcgtctgccattctgccacactcctgtctgtttaaaactgtttttaattataccattgttagaatatacgttaataatcctaatttataataaagtacgtcgccaatattaacgaaaaggcgaatcagcatgataaaaacactaaccgagatacaattttaaattactacaattatcaaccatcctagctggcacgattataatggctaacattcatcaacaatcatttaaccaaaaaactcgaatcgcaatctcgcatgccactcaagttttattttaacatcagcttaaccaatcccccttactacccgattgaaccttccatctcaaagctgattagccggtttaattcaacagcatattccatcggtaattgcttcgtaaatggttctacgaatcccatgataatcatttcggttgccttagcttctgaaattcctcggctcatcaagtagtagagctgttcttctgagattttggacaccttagcttcgtgttccatcgcgacgttagcactgtcgatttcattatacggaatcgtgttggaagacgactggtcatccatgatgatcgtatcacactcaacatgcgctttggaaccgtctgaatgcttggcaaaacgcacggttccacggtaatcagtcgcaccaccagtcttagcgatggacttcgaaacaatcgaactggaggtattcttagcattatgaatcatccgagcaccagaatcttggtggatgccattgctggcaaccgcgatcgataacatggtcccgcgggcaccttccccattcaaataaacgcttgggtacttcatcgtaaccttcgaacctaaattcccatcgacccattccatcgtggcattttcggccgctgcagctcgcttagtttccaggctataaacattgtcagaccagttttgaatcgttgtataacggcagtaagcgttgggctcaacattgacttcaacaacggccgcgtgcaaactatctgaagaataattaggggccgtacacccttcgacatagtcgacactggcaccatcttccacgataatcaaagtccgctcaaactgacccgagttttcagcatttaaccggaaatatgactgaattggcgtcttcgtctggacacccttaggcacgtaaatgaaggacccacctgaccagaccgccgcgtttaaagccgcaaacttgttatcggttggtttgacgagtttcccaaaccacttcttgaacagttctggataatcgtgaagcgccgtatcggtatcggtaaaaataatacctaacttttcaaaatctttacgcatattgtgataaacgacttcagattcatactgcgccgatgaaccggctaagtatttccgttcagcttcaggcacacctaaccggtcgaacgtccgcttcaagtcagctgggacttctttccagtcacggaactttttatcggtcatcttctgataatacagcatgtccttcaagtcgagtttcgtgagatccgggccaaacttaggcatcggcatctttaaatactcatgataggcatttaaccgataatccaacatccattgtggctcatgttttgccgcggaaatttcgcgcaccgtggcttccgttaatcctcgcccagttgaatatgctggtttgacatcgtcatgaaatccatattcataatcacggtcatttttgaccacgtcaggtacttcactcatacttctgattcctcctcattgccattttcagcaagcaatgcccgttgcaaagcccaccaagctagcgtggcacatttgattcgtgccggaaattgcataatattcgataaaattgcggcgtcttctaaggcatccatatcggcctgcgggtgttgcttgccaatcgccatatccgaaaatgtcttagccattgccaatgcctgttctttcgacttacccatcaccgcatccgtcatcatactggccgatgcttgactgatggtacagccctcacccgtaaatccaatatcttcgatttgatcatgcgcatccaattgaatagccaaattgatgacgtcgccacaagttggatttttcaacgtaatggcatgtgttgcgtttggcaacgcatttttatgatgcggatgatcaccatgatctaaaatcacttcgcgatataagccacttaatttagacagtcccatgttcgaaaaactcctttgttgcttggagtgacgttaataattgatcagcgtccgcttgtgtattgtaaatgtaaaaactagcccgtgcagttgctactaagccgagcgctgccatcaggggttgtgcacagtgatgacccgcgcgaacggcgacaccttccatatccaacgcggtagccgcgtcgtgcgggtgcaaaccgtcgatattaaaggcgatgacgcccgtatgatgttggggatcttggggaccgtagaccgtgacaccaggcattgcaatcaacttaggcaataagtaattgactaattgctgttcgtgttgctgaacttgatccataccgagttgcgtcaaataatcaaccgccgcgcccaagccgagcgcaccggcaatgttctgagtgcccgcttccaacttccacggtagttccgcccaggtactgtcatcacggtgaacaaagccaatcatctcaccaccaaattgatacggtggcatcgtagctaataaattctcacgaccatatagaacgccaataccggttggtcctagcattttatgccctgaaaatgcgtaaaaatcaacatcgagtgcctggacatcgaccggcatatgaggggctgcttgcgccccatccgcaatcatcacggcaccgtgttgatgcgccaatcgtgctaacgccttgattggattgaccgttcccaatacattactagcatgggtcactgaaacaatttttgttcgatccgtaatcttgttggcagcatcggccatgtccaattcaccagtcgacgttaactcaatatatttcaaggtggcgtgcttacgcaatgctaactgttgccacggaattaaattactatgatgctccataatggaaatgacgatctcatcacccgcttgaatattggcttcgccataagtactggcaatcagattgagactatccgtcgtccctttggtgaagacgatttcatccgtttttgcagcattgatgaaccgttgcaccttggcgcgcgcagcttcgtattgactagtggcccgctctgctaaggtgtgcacaccgcgatgaacattggcattatcgtgttgataaaagtgaacgagcgcatccacgacttggttggggcgctgcgcagtcgccgcattatccaggtagacaagtcgttcatcattcacttgttggtttagaatgggaaaatctgaccgtaacgtctcaaaattggatgccatcttcaagcttcctttcaatcgtgttcgttaagcgagtccggacagtcttcgatgggatcgcaccaatcacggtacttaagaagccccgaataaccaaccgttgggcctgtggtttatcaatcccgcgactcatcaaatagtacatttgattttgatcaatttgaccaacacttgctgcatgtccagctaacacgtcattttcatcgatcaatagaatcgggttcgcgtcaccatgggcatcatcagacatcatcaaaacccgattttcctgttcagcatgtgcaccggaggccccgtgaataatgtgaccgattccgttaaaaatcaggttagacttttccataatgaccccacgttgtacgatattgccgtcagtcttcttaccacggttagtgacccgcgtattaacacagacatcctgggccttggtcgtcactgtgatgaccttggcatcggatttggcgccctcaccgatcagttccgagtcaaagtccccgaaagtgttaccgttattcatcatcccgatagcccaatcgactttggctccccgactgatcgcggcccgccgattcaaataagcagtcgtgttggccccgagttcatcgaacgctgaaaaatgcacttcactgtcagcccgtgccaaaatttctacaacacagttggcgatattatcgacgtcacccttcgttgtcaggtgctgagttactgcgaaatgactgtcttgttcagccacaatcaagacgtgactaattaacggttgcactcgggtactatcctgaatcgtggtgatctcaattggttctttgacagtaacccctttaggaacatataggaagaccccggcgttcaaaaacgcggtatggtagctggtcaaccggtcctcgtcagttttgacgactttgcccataaaatgtttttcagttagctgtggatgttcgcgaaaagccgtgaacatatcggtcaaaatgacaccctgatcatctagttcatcaggcaaattgacggtcaccgttgtctgcccaacttgtacgatttggatatgaccagcttcagccgttacatcagttgctaaagttcgatccgaacgactgaactttagtggttggtcggtgggcgtcagtggccagtcgcgaatactaaagcgatcagctttgggaaccgctaggccttgcatcgcatctaaagccgctaaacggcgttcaacgagccagtgcggttcaccatgttcgttagcagccgcagctagcgttgttttgatagtttcataatcagcagttgcttccattactgccaccccctaatcttcgtcgtcaacaagtttgacatcaatgttcaaatcgtcacgtaaaccagcataaccttctttttcaagggtctttgctaagtcggcgttaccagtcttcacgattcgaccacccatcatcacgtgaacgacatcgggcacaatgtagtttaacagccgttgataatgcgtgataatcaatgagccgaaattatcgccccgcatcgaattaacacccttagaaaccacttgtaacgcatcgatatcaagcccggaatcaatttcgtccaataaggcgaatgatggcttgatcatcaataattgcaaaatttcgttacgcttcttttcaccaccggagaaaccttcgtttaggtaacgttccgtcatggattcgctcatattaagtagtgccaagttcttgtcgagttctttaagaaaggccatcactgagatttgatcatcagctggtcgacgtgcgttcattgctgcccgtaaaaattcagcgttggtgaccccttgaatttcagctggatactgcatgccgaggaagagtcccttacgtgcacgttcatcaactggcatgtttacgatactttcgccgttcaacaagatatcaccctgagtaacgtgataagccggttggcccataatagtttgtgataaagtggacttaccagtcccatttggtcccataatggcatgaatttcaccagttttcatagataaattgacgccttttaaaatctcacgagactttttttgctcatcatccgtcacttcaacgtgtaaatctttaacttccaaggttgccatttaaatcatcctccaacaattgaatttattacccaagccgttattccttccgtatataatgattagtcaacggcttcaacaaaaatagcgtaacatcggcctttttgtattctatacttagagtataaccgttttcatttcaaaagaaaataaggcttttccccatattaataaaagccctttcatgctatgatgtaggtataatatttttgatgaattattcactattggaatattcagaaaggactgagccttatgctaagtcaatccgttactaatacatcacaactacatattcaacaattcacaggtttggataatcagaccgttcaacgattgcacagcttagggctacatgtcggcagtccgctggccgttatccgctactatccgtttcacggaccagtaattgttcagattgatcaacaacggattgggattcggtacaccgtatttcaaacgttgattggaggccattaagatgacgacggttgcattgctcggaaatcccaatactggtaagaccacgctattcaatgaactgacggataaatacgcgtacgtcggtaactggaccggcgtgaccgttgagaagaagatgggccggattcggcactctgaagttgaaatggtcgatttacccggagtctattcacttaatccaatcaccaaagatgaagcagtcgtcaccaactatctgctacataaccaccctgatctaattctgaacgtgaccaacgcgagtcagctcaagcgtaacttactactgtcgatcgaagtgttggaatttggcgcaccggtgattatcgcactcaacatgattgatgacctcaaacggacgggccattattatgattttgacacgctagctgaacaacttggctgtcagatcaaagcgactaacgcccgcaataaagaagggctgcatcagctacgcgaagacttattggcaggtccccatccggccgcgacaccgctcaaactcaactatcctttcatgattgagcaagccattcgtcaggctagccaacagctcatcaaaaaatttgatttgacagcagacttcgcacggtggctgacgattcaatttattaatcaaaataagccaattcgagcctacgcgaaacacatgggattgacaccactcactagtcaagccgcttattacgacgctcaaaaattcgacgagcagatcttccaaacccgactagactttattgagcaaaccttagccagcgctagtcaaaacttggcaagcaccagccacgtcgagatgactgctaaaatcgacaagtgggtcaccaatccgtccttagggctacccgtcttcgtgggaatcttctacttgatgttcaaattatcctttgattgggtcggcacgcccctgtcagatttgttagatagcttcgtctccggaccactatccaccaccgtgagtcactggttgaccatggctggagccatcccggtcttgcgctcactgattgttaacggcctaattgcaggggtcggtggcgtgctcgtctttattccccaaatttttgtcttgtttgcctgtatttcaatcttggaagattcaggttacatggcacgagcagcactagttacggaccgcttgatgcagatgattggactcaacgggaaggcatttatccccctaattattggatttggatgcaacgtcactggtattatggccgcccggacaattgaacaacctaaagaacgcttaattacaacgctgatttccccatttatgagttgctccgcccgtctgccaatctacagcctatttgtggccgcttttttcccgaaaaatcaggccctaattgtcttgtcgatttactttcttggcattgcggtcgccctcggtatggctaaattttatcaactgattttcaacgtcgatgatagttccgtcttcatcgttgagttaccacagtatcatattccccgggctgacattatttggcgtggcacctgggataagggtaaagggttcatcaaaaaggcaggtactatcatttttgccggtacggtcttgatttggttactttcctcattcggtactagcggcttagtcagcgacatcgacaacagctttgccgcgacacttggcaaaacactattaccgctgttcgcgccactcggtgtgactgcttggcaagttatctcagccctctttactgggattctagccaaagaagtcatcagctctagtatgatggtaatgttccacagcgcaaatcaggccggcttgattgccatgatggggcgctttttcacaccgttatccgcatacgcgatgctcgtcttcatcttgctatatgtcccgtgcttcgccacgattgggaccatcaagtccgagactggatcgaccaagtgggctgtttacgccgtctgctcgagtttggtcattgcttacaccttggccttcgtcatttaccaagttggtcaattatttatctgaaaggagtttgattcacatggcattattcgttaatttcttaattatcgcactaattattggggctgctggctatcagatttatcgcgtggtcaaacgtgctaaaaagggcaaatgtgcggcctgcgactatgattgtgaagctaagaaaatgttaaacaaagcccagaagcaacaaaactaagactactgcacctgcctcactaaccacgtggttaatccttagaaatcatacacactaataaaacaccaatgacggagattctagtgaattatcctcattggtgctttatttatcgactgcataagttccattaaaacttgtaaggtcaaaataggtcgcacaactgttgtctagcaataatctaacatctctcatagggtttcatcttggatgctaacgccggtttacgctaaatcaatttaaagacagactaaaaaagcggccctgctggggccgcttttttaaaaattatttcatttggtcttcataaattttttcgtacttttgaatgtcaccagcacccataaagacagcgacggcattgtggtaagccgttaaagcagacatgtcatcggtcgtgataatttcaccaccattgggtaacttagcagctaagtctttggaggaaacatcaccagatttttcacgggcagaactgaagatattggtcaaaaagacgtgatctgccttgcttaagctggctgcaaagccatccatcaatgctttcgtccgtgagaacgtatgtggttggaatacggccaagatttccttatccggatacttttggcgtgcagcatccaatgttgctttaatttctgatggatgatgtgcgtagtcgtcgatcatgaccatatcgccaacttgatgttctgagaaacgtcgtttaaccccactaaagtcgaggagttcccgccgaatttcgtccaagttcaccttttcaaagtaagaaaccgcaatgacagccgtgctgtttaagacattgtgttcaccaaacaatgggatttcaaattcccctaacgattcatcgtgatacttcacttcaaatgaagaccccttagtcgttcgtttgatattaaccgcttgaaagtcgtcacggtcattcgtcccgtaatagtaaattggggtatcaacatcgaggtgtcgtaaactttcatcgtcaccccaagcaaagatgcccttcttcacttgattgccaaattgttggaaagcggattgaacgtcagctaaatccttgtagtaatcaggatggtcaaagtcaacgttcgtcatgatggcataatcgggatggtaagcaacgaagtgccgccgatattcatccgcttcaaaaacgaagaaacgcgcgtcaggggtgcctttaccggtcccatcaccaatcaagtaactggtgggagcaatatgactcaaaacgtgggacaacaaaccagttgtcgacgtcttcccgtgagtcccggccacaccaatactcgtgaagccttccattaattttccaagaaattcatgataacgataaacgggcaaccccatttcacgcgcctttttgatttcaggatggtcatcagtaaatgagttccccgcaatcactgtgaggccttcgcgaatgttatcttcggaaaacggtagcatcttaatgccagctgcagctagacctttttgcgtaaacgtatattgttcaatatctgagccttcaacttggtaacccttgtcatgtaaaatcaaggctagtgagctcatcccagagcccttgatcccaacaaaataataaaccgttgctttatccattatgctaataatctcccatattcacaattcatcaatcatgaggtgaatcgctttatttttaattatgaattggcttgtaatttagttaaatctgctgccgtgaaataaacatctcgtggtttggaacccttagctgctgaaacgtagccgcgactttccaaatcatcaataatattggccgcccgattatagccaatcgagaagtttcgttgcaacttcgatgttgacatggtatcttcatcggcaatgtaagccaatgcttcaggcatcaagtcatcttcattgcgtgctgcttcctcgtgcttcattaggctgtctggctgaaattcatagtgcggtgctgcctgatcacggacaaactgagtgatactgtcaatctcactgtccacgaacgtcccctgcaaccgaatcggtgcgggttgaccgttgccaagatacaacatatcaccgcgtcccaacaggcgttccgccccactcgcgtccagaatcgtccgcgaatcgatctggctggcaaccatgaaggccacccgcgttgggatattattcttgatcaaaccagtgaccacatcaacacttggccgctgggtcgcaactagtaaatgaatccctgccgcacgggctttctgggtgattctggcaatgtaatcctgaacctcactagaagcaaccatcatcaaatcagctaattcgtcgattacaatcacgatatacggcatttttagagccggctcgtcatgttcgtcggccagtttgttgaattgctcaatgttccgggcaccaccagcggcaagtttatcataccggttgtccatttcatcaacgacccatttcagcgctgccgaagcggctttgggttctgaaatcacgggtgctaataaatgtggaatctcgttgtatggtgctagttctacggccttcggatcaattaacaacaatttaacttgttgtgggttcgctttgtacagaatcgaaaccaggatactattgatgaagactgattttccagaacccgtagcccccgcaatcaaaccgtgcggcatcttccgcaggtcagtgacttgtggttgcccgaataaatcgacaccgagtgcgaccgtcaatggtgacttactgtcgcggaatttgtcagaatctaaaacttcagacagcatcaccggccgcgatttcgcatttggaatttcaatcccaatcgtattacggccagggatcggcgcttcaattcgaatatcttttgcagccaaggccaatttcaaatcatcatttaagttggtaatcttgctgaccttgacgccacgagcaggttttacttggaactgagtcacggttggcccaatcgtccaatcgacaacgttggcattgacaccaaatgcgtccagagattcatctaacgcactggccttctgctcgatccaatcatccatctcagattcattagccacgatcggtgctttcaacagattcagcggtggcaaatgataagccgctaattctttatcctcaaggacgggggccgctgaaccgccactatgaactaactcaggttgtgaagccactgcagatgtctctgacaaagcgggactagttgtaactgcagaagtagccgcctgtgacggtgccatagtcacactagccgctcccccactttcctgtaaaggtaccgtggatgccacaacgctgactggcgtggccgttgccgacgtcacagcaggacttgtgctagttggccgcatgccaaccggttgataaggttcttcgttaacgtgtgaacgagtctgcgcagtacttgactgtggtgctgcagaagccgccgttgttggctgatccttaaataacgctaagtccgcctgggcatcgtgctcagcggtcataatatcccctaaggatagtcctagcccatgtgctgacttgggtgtcgcactagtcgcagcagattctattttatcatgatcagcagccgcattaacagttgcagcagattcagcaagcgcgggatcagttggttcaaacacttctgtcggccctgccgatactgccgaacttgccgcgctaggcgcatttacggcggccgccgacgctgctaaacttgggtcagtgggctcaaatacttccgtggggcctgccgatactgccgaacttaccgcgctaggcgcatttacggcggccgccgacgctgctaagcttgggtcagtgggctcaaatacttccgtggggcctgccgatactgccgaacttaccgcgctaggcgcatttatggcggctgccgacgctgctaaacttgggtcagtgggctcaaatacttccgtgggagccgtcactaccactgaatcatcggttttaggcgtattaattgccgcagccgacacagctaattcaggagtagtaggttcaaacacttccgttggtcgcacaaccgtcgccgaagctgcggacaccgtggaatcactgccggtctgtgacgtgttagccacgaccgtttgagcagccccgctcgatgctgcctgactagttaccgttgtcgggtcaacacttgaagccgtcttccgttccgcttgactaagaactgccgaatcactcgggtgttcaacttgactcgtgtccgtcccactatcagaaagcggttgttgcaaatcaacagccggtaaatcattagctgctgcatccgcaaacaataagaaggtctcgggccgcttatgcaagctcgcttcaatttctaaataattacggtcatcgtgatcctgaatgataccgccatttgtcagcgccgcactaagctgggctggtacccgggatgggtgaaaagtcccatgggtgccaccgttaaagagggtcgcactagttgcagcactgctactcgaagtagttgcctgactcgtcacctgcttggcgctagtttgactggctgcccgctttggcgtcgcactaggtgcaccagcagtcgattgtggactagccgatgccgctacaggagttgattgactggccgctgaattattcacttgtggtttgttaaatcgatatttccggaaaaatgccgggccatcataatggttcattttcaatcatcctagtttttaatatctgcaaattaagcggtaaataacgtctgagcgcgtttaaaatcgaatgccgcacccactggctgataatcggcgggcaaaatcaaagctcctggccgttgtggcgcgttcggtaatcgtaattcccggcctgaaacaatcatgccatcactctcaacgccccgtaattcgcccggccaaataattaagccactgggcatcattgcaccgaccttggcaacaacaactaaaatattcgcctgcatattaggtgaaccactcacgatttgaagtggttgttccaaaccaacattcgtcttggtaatctgtaaatgatcagactttggatgtgcttcggctgattccacatagccgaccacaaacttagggtcagtgtctaaaactaattcaggttcaaaatcattggtttttaataaattatttaattgctcaacttgttcggccgttaagtgaacttgaccattggcatctaagtcgcctaacgtcttggaaacgtcaaagaaattatagcccaaggtttccccactgtcagcatcgctaatacgcgtcacattggcatgtgtttcaatcgtttgggtggccgcatctggtcgtaaaatggtgattaacgtgtcacctaattcggatggattataacttgtaattaacatgtgaaacccctttactctcattttagcgttcaatatattattatagcgtattttacttaaatcatactgattaattatgacttttctttgtattctcgtcaatcattggtatactaaatttaaataaaacatttcctagtcaagttagctgaaaggagacgcaacatcatgaataaacaattacaatatggcggcttgttagcggttgggatggctggtatcgccgggggcttttccgttggcggcctgttcaagcggttgcgccgccccacccctaaccaaattcttagccaagtcaagcgcgcgtttttgaaggaagcaccgattgaaggctcgtggattgaaatgaaaaaatccccattacaaaagttcgcattgcgcacggatgtctactatggcggcattacccgctatgaagatggtcagctggtacagtacgagtttttggccgatgcaaatactggtagtattttagacatttaccggctttaataactcacaattgactatccgcatcaaaaatcaaaaatgagcttctggaattaaaattctggaagctcatttttgatgtttccgacaattacactcaattaaaaaacagcgatcgccgacgcgtttcgctgttctcattcagtctattttgctgggaaagttgcaataatcttataaattgggcccgccgcactgaacttctgttcatattcagtctcgacgttatcctcaggtgtggcaaccgcatgcaagtctaaccaaacttgttcaaattgcatcccaaagttattcatgctcgttaatgaaaattcgaatagcccccggttatcagtcttaaattcaatctgaccgttgggttttaagacttcccggtaactgctcaaaaacgacttgtaggtcaaacgccgcttttcatgacgcgacttcggccacggatcagagaagttcagatataagcgatcaacttcatggggttcgaaaaaggcagtcaccgcttgaccgtccgcatgtgccaattgcaggttaggcagcggggcctcgactagctttttcaaaataatcgcaatcaccgaggtctgaatttcaatggcaacgtaatttatctcaggatgacgcttagccatttcaatgatgaactggcccttcccactccccacttcaatctggagtggctggggtttggcaaaacggctttgccagcggccttttaactgagttggatcttcggtaataagttcgggatgggcggcaattaactttggcgcccacggtttatttctgacacgcatcttgattgactccttcttcatttgcttactcaacaaaatcgccgcgaattccatctgggactcgcggcgattttgttgctcgtcgttacacttcgtactgcgataattcttctaaaaagataatttcatggttcatctgatggtactgattccgataataattatctttgatattcaatagtaaattaatcttagcataccagaccactcgcgtccgtaaggcggtcgtcatagtctcaccgtattcactaagccactgttgccaatcacttaacgggacatattcgcatagtagcatactaatatctgacgccggatccgcaaatcttgcggaatcccagtcaaccaagtacagttgttggcgatcagatagtaaccagttcttgtggttaagatcaccgtgacaaacgcgataatcagtggccggtaaagtgggtgcggttcctcttaattcatccagaacccgggccattaacggatggtgccgtaaatcatctggtaaatcttgtaagtattgctgaataaagtcttgtgggcggacactctgaccaccgacttttcttaacatccggtgaagcaactcggaattgtgcacacgtgccaataaatgcgccacttcaggcagccgcatttgttgcttcgttaaagtttgaccattcaaccactcttgggctgtcagcgtatccccgctcgagatacgcttcgtccagattaatcgcggggtaatttcttccatcgacagcgccgctaggaacggcgaggcgtttcgctttaagaacaatcgttggtgattttttttgcccatgaaagctttattcgtattcccatagatcgggtaaacgtcccagccatcatcaagttcgaaatccatcagccccactcctctcaaaatttatttaatgactcattattatttgacttaacaatcacattttatagacgaaagttgaatccgtcaagtcctttttaacccttgatacatcaaggttttaagctaatcttaattttaaataccaagtaactaagagatagatttcaatcacgttaatgatgagcaaaatcccaacttgagctaacggtgcgttgcttaaccagaacgcaactaaaaagattaatcccgtcaaacttaacacgtttcgcaataaccgctgaaagtttttcacccgctgtttagttgccagcggataaatgtgcgtaaaaactatattatcgtattgcttgtaaaacggcaacaattgaaacccaatcaagtaaataaataaggcgtccaacgccatcgctaaccaaccgtgcccactaaagtacagtagcaccgcaccaataactgtcaaacgaaccactaacccgctaaattccgtgccgcgcaacatgccacgtgtatataggtagccaaacgcatgctgctggtccttaggtaaccaccgtagtaaccaatccaggtaccgacgacgtttgacactgccttgcaccattggtacatccgtaaataaattaaagaatcgataaatccctaacatacggttggcttcggctttgatgtcgtcacgccaagcaatcaccgtggtcgaccaaattcgttggtgcaaataacgttgtcccaccgcaatcgcgatagccattacggcactcaaccacggcgtcactagtagtcccactgccaacgtgacgaacgcgccggcccagttcagggggcgcaaccaccgcttcatgcttggcttcacttgatagagatgcgtcacgctcagcgttaactgggcatcctttaacgccaactgggtgatgagtaacgccagcaacgaccagcccgtcatctgatcaacgatcatgagcaacggcacggtcaagccaacaaaaatcacttggactgcttgcgccaaccaccaactgtagcgccacgctttcacgaagtacgcatgcacatctcgttcacgtggtaacaggaaaacggtatcggccggttctaataacgttgcgatatgactgacacttaggcccgcccataataagagaccgagcacccagacgatccacgtctgctgagggccaagcgtcttgagccaattggaataagccagcccgagtccgccgacaaaaaacatcaatgcaatgacaaagtgatcattgaacaccaatcttaggtagcgcagcatccgacgcagatgccgctgcaaccgcgtttgaaataactcattcatcacgggtcaccccggtcaatgaaagataaatatcgtttaacgactcacccgcatccggataattcgctttgatttcagcaaaagtcccctgtgtctgtacttcaccagcatgcaataatacaaacttatcacaagctttttcagccgtgtccaaaacgtgcgtcgacataaggacagcggctccctgtgctttgactgtcgcaatcaatgccaacaagtcgtgcaccgccaaaggatccagtcctaagaaaggctcatcaataatgaacaacttagcgttagtgatgaacgcacaaacaatcatgactttctgtttcattccctttgagaagttcgcggggaaccaatccaacttgttagccaatcggaaagttttcaataagtcatgagcccgttgccaagcctgttcttggtctaaaccatacgccagcatcgtcatttctagatgttcttttaatgttaactcttcatataagataggtgtttctggaatgtacgcaatttggcttttatagctttgaggatcttgtgctaatgtcacgccattgagcgcaattgatcctttcatgggcgtcaacaaaccgataatatgattaatggtcgttgacttaccggccccgttaagtccgatcaagcccactaattcaccgggctcaacttgaaaactaatatcttttaagacgggaatttgcgaatacccaccaactaagtgttgtaccgctaatgtcataacgttaacctctttctgtgttggtataagtgctcccattatagcatagccatcacgacaccctctatttggttggctcattgatccccgactttaccgaaacttcagtaatttgtcgtcaatcaagctacctagttttgattgccgcaacatcgatagtgtataatgaacccaactaataaataaagaaggttatcacatgacagcttttgaaccaaaactcgatgacgattgtatcttttgtaaaataattaagggcgatattccgagctataccgtttatgaagacgacatggtcaaagcctttcttgacatctcgcaaggtactcctggtcacaccttagtcgtaccgaagacgcacgttgccgatattttcggttacgatcgtgatcttgccagcatcgtgtttgcgcggattcctgaaatcgcccgcgctatcaaagcaactgacgagaatatcattggcatgaatatcgttaacaataatggtgcggtcgcttatcagtccgtcttccactcccattttcacctcatcccccgctacagcgataaagatgattttcggatgatctttaaggacaacgccaaaaaatatgacgaaaccgactacactcgcttacagaacgccattaaaactgaattagctaattaggaggtctcccatggcaaagtttattcgtaacagcctgatcggtctgggtctcagtgctgcgacctacatgttgatcaatcagaaaacacctaaagcactctacacagacatcaaaagttacgtgcaagacgttttagatgctgctgataacttacaagacgcacgtgaagagtttagcgatgcccagagcaatctcagtgttcaaatggcccacgctgcggaagtttttgatgacattcagactgaattggataaatttcaatttaagattgaaccccacgtagccatcatgaaaaaacgtgcggatcacttacaagacaccttagaccatttaaccaagacaaccgactgagcaagtaatcgtgaggtcgcattaggcccacgatttttttgtttgctatcttaacaagctgatttcgtttaaattcactgacgcattaggtagaatttatgaagaggctgtgaaatctctgaaaattttgtaaagatttccatatgcatgcagaagctttaatagatatggtatagtagtcgttgaagtctgctaacgcagaacgatttcaagaataggatgtgttttaggaatgaagaaatggctcattgcccttgctggtgtcttactaaccttcaccttagctggttgtggtagcaagaccgttgcatcaacttccggtggtaagattaccgaaagccaatattacagtagtatgaagggaacctcttcaggtaagcaagtcttgcaacaaatgatcctgaataaggtgctcgaaaaggattatggctcaaaagtttcgactaagcaagtgacgaagcaatataatacttacaagtcacaatatggtagttctttctcaaccgtcttatcgcaaaatggtttgacgaccaagaccttcaaggaacaattacgttctaacttattattgaaggaagccgttaaagacaaggtcaagattactgataaagctttgaagaagcaatggaagtcttacgaacctaaagtcacggttcaacatatcctagttgccaaatcagcaactgctgacaaagtcttagacgctttgaagaaggattctagccaagccaactttacgaagttagccaagaagtattcaactgatacaacgactaagaatgatggtggtaagttatcagcctttgataacactaacacgagctactcatctaaattcttaacggctgctttcaagctgaagaacggtgaatacacgacttccgctgttaagaccagcaacggttatgaaatcatccggatgatcaagaaccctggtaagggtaagatgtctgatcacaccgttgatttgaagaaacaaatttgggacaatgatatgagcgactccactgtcttacaaaacgttgtttctaaagtgcttaagggtgggaacgtttcaatcaaggataacgatttgaaggatatcttatcgtcatacctttcaacctcatcttcatcaagctctaactaattaaattaattaagccaccctgacgtttaacatgtcagggtggctttttgtgtggaatcatgattttaaacgcttgttttttgaaaacgactaacgttattcgtgagcgctttgcaccaggccaccgataaatatatcccgggaacgcctcccaagctacttaatcacatccaaacaattcacgccgaaagactaaccgtcagctagctgctcgcaaatttagcagtaaatacctcaaaatgggcattgagcagtttatgatttaaggtttgttgccaccacttcgtatccactgtaatatcaggatgccaagcagcagttaaggccgcggtaatcgtggcaatcgtatccgtatcgccgccaaagttaacagccgctaacaccgcttcccgtggcgtctggtagtttaaagctaaccagcatgcggccaacagggtatccacaacgtaaccgctagtccgaatgactccggcttttgtttgggcgaagtctggtgaaaataacgcgccatatgtgctcagttcacctaaaagtgtcatatccttgattgtactgattagcaattcatgcaccgataccagtgcagcaggcaacgcttgtccctgatgaagcgcatgcaacacttccaaataaattagactcgccacaactgaacgagcatgaccatgtgtcaacatcgtgtaatttctagttatcgtcagtcgatgtgcgacgcttgtgtcattctgcagagccaccgctaacggcgctaagtacatcagcgcgccgttgccattcgcatgcaccgaaggatcaccgcattggcgggccggaaactgattgatggcataattccgaattgcatgagcacaagtccgaccaatgtcaaacagttcaccacgcggcgtgttcgttccaaagcgcatatagttctcaaatcgggacatgagatcatcataatcaccaccgctaaccaaattctcaatcaatcctaaactcatcgatgtgtcatcagaccagctccctgctggctgtttccaaaagtcacttgcgaccatttccgtaattaacggataagttccccgttgacgattttccgcgggcaaccctaatgcgtccgctactactgaccatcgtaagccattgataatttccgctcggcgcacgcccatcactcctcccgttagttaaccgattctttatttattcatatgacttaattatacgccattacacctagtgctgcacatcaacactgtcctacatcatcgtggcctgattgataagctaatactaatcaatattcatcaaaatatatgcgtaaaaatagccgcaacctaatagattatgctagccctatagcaacgataaacgcaagacaatcttctggccaggagttgattatcgttaccaaacatttgttgatcaccgcaggcacggacaaccaaaaaggagcgatccatcatgaaaaaaacagtgcttaccgcgaccatgttgttaagcttactaggaatgcccgccgtcatggcaaccgccgattcaactgcgaacacaactactaatttggaattgacagaaaatactggaccaactatcccagtagatcccactaacccggccaatccacaagttccagaagatccagacaatccagctactggtaatactggtgctctaacattagacgtggctcctcgaactttcgacttcggctccgttcaaacttatgccgccgaacacacttataaggccacgacgaccactaatgggcaacaatatttacaggtcaccgataaccgtgggaccgatgaacagggttggaccgtaaccgtcgagcaagatcaagatttaaccgaaactagtggaagttcaccgcatgttttgaccggtaccaccatccacgtaccagctgcgattgcacgtaatagtctggcaactgaccctacggcggtcgataccaacctaacgactacagctgccgatgttaccaatacgagtggtgccgtgaccgtttttaatacaacggccactaccggcgctggtaaaggcacttcggttaaagtttgggatccaagtgatgtcactttgacgattcccaaaaacacggccaaaccaggagcctacagcaacactttgacatggaccttgaccgctgctacccctagctaaccataaggagggattgccatgtttaaccgcttttgtcttagtacggggttagcgattttagggttaatggcaaccagtttgacggctctcggggcaacgactaatggtaccgtgacttttcaagatgatactagtgccacggccccagttgatcccactagtcccaacgtcccgttgacaaccaccgatccgaataatccggcaactaacaataccggaacattgaccctcgatgtagccccaaaaactatcgactttggtaccgtcactacgtccaacgcagcccaaaacttacactgcaattggcaactacaatcaatatctacaagtctcggacaaacgcaccactgccaacggctggcaagtcaacgttaagcaagaccggacgttaactaacgctagtaataatcacgtgctgactggtgcggtgattcacctaccccaaggaactgcgcgtaattcgctaaacgagcccgcctcagtagccgattccaatttagttgttgcccccagtgtaagcgtcaccaccgctgaccaagtcgttttcagtgctcccaaccgggcgggtgttggtaaagccacttccacaaacacttggaacgcgggtgccgtgaccctttcaatccccaagctgacagcccaagtcggtaactacacgaacaacttagtttggacgttagtcgccgctaccactaactaggaggtaatcatgaaaaaattgatgtgcttattcggcgtaattggtggcttggttttcatgagttggacctcaccaagcgtccaggccaccgctaccaatgccgaagttcaatatagtgttaacagaatcagtcccggccaagaagtcgatgctagcagtccgtttttcgaccttaaggccaaggcgggcaccactcgtaaaattcaggcgcgggtctataacccgactgaccaatcaattacggtcaagacccagctactcacgacatttacgaatgattcaggccaaatcgcttacacccaaacagccaaacgatacgatgccagcttaaaatatcgttttgatcaaattgcgactttggcagccggttccgataaagtcacggtccccgccaaaagtaaccgggtcgtcagcgccacaatcaacattcccaaaggattcgataccggggtaatcttaggctcatggtacttcgaaaaaatggggcaaggcgcgaaaaaagcatccaagggcgtcaatattaaccaaaaatatagttatgcgttagcggttaaactgacggccaaagaaattgcacagcctaagttgactttggggacggtcactcccggattacgcaactatcgcaaagtcgtgctcgcgaccattcggaacccagaaccagcagtggtctcgcaattaaaactgaccactaaggtcacgagaaaaggcagttccaaggtactctatcagaacagtagcgacaacttgatcatggcccccaattcgaacttcacttaccccacttttttagacgatcaagtcatgcgggcgggtgattataccttatccgtcaccgcaacgactaacgactccaaatgggccaaaaaaacttggcattggtcccgggactttaagattacgactgaacaagcacgtcaaaataatcaaaaagccaagaatgacccggccgcccccatcagtatctggtggtacgtcctaatcgtcattgtaattgctggcttatccgccggaatcgtttatctaattatgaaacgacacaatcgcagaacctaaataagcagttaattttagattatcttctaacttggtactcaaacaaggaggttatcgttatggctaaattcaggcggctagttttactatcattaagccttggactagccctcgctggtggctgtcggagtcccgatgccctagcggctaccccaactgacactagtgtgacattgaccgactggcaagccgggacggacctgacaaacttccagcacccccgtccctatcaatatctagcggtgcccaacatcatcgccactgctaatcaacaggcttcgactcagacaccatcatccgcggcaatacgtccagatcaatcagtgctaccacaaacgaatgaagcccgccaactgttagtctggttaggtctgttgacagctgtcttagccggttggctcgtgtggctcatgcaacgccgaagggagtgagcaatttgcaacgaccacgaagattaataacggcttggctcgggttactcgttctcttaatgagtctactcgttgtcaacggcggtgccatttatgcgacagcgaccaccacgaccacaccaatcaaattcgaggaaccacccacggaattagtgattgggcaaccttttacacttcagttggccgtacaaggttcccaggaacaccaagtcatggtcgctattcctgaggccctcaccgttgaccaaactaaaacccggcaagccaacagagcgagcctcgctgagctggattttgatgctgacaaccggaaactaactttgacgccatctgatccgacagccagtaccacgttcgatttggtattgagtgccagtgaagcgaaaacctacaaagtgaccgcggaagcactgattactgggccagcattagcgaccactaccgcttcagctgtcgccagtagtgaaaaaccgacgacccacaccatgaccgctgaaccaataactttcaccgtggccgcgggctccgcagtcgactcacctcctgaagaagccggcactgaatcagcacgtgaggtcagcaatgatgccgaaagcacctcttcggccagtcaagacccgaccactgacgattcgtcagcaacagcaacacaagcggctaccacgaaacgtgatgactacaatgccacaagcaaatcgtccgaacagtcgtctagtaccaccgcgacatcggacccgactgctgacaacgacactgctactagtcgcacagcgcaggctgattcggaagtagaacggacaccgaaagcgactaaagcgactgccaccaaagccgctaatgatatcacgaccgcagcaatcgtggtcaatccagatggtagcacgaccgtctcaacttatgatgatttaaaatcagcgtataccaataccgccgtcacgacgattaaattgggggccaacattacccacacgtcaacaagtgctacagaattaggcactcgtaccaccagcctgaccatcgacgggcaaaatcacagccttgatctcggcatcggtaacttcacattgggttccacaaccacggcccagacaatgacagtaaaaaacttcagtagtattcgtggcgcaattgcgagtggaacaagtagtggtggcgccgccggaatcattcaaagtgggaccgatggtggggctaatgctggtggagctcgttggacaattacagtgaccgatttaatcactaccagcgacgtttaccgcctcgtcaacgctcctggtaatcaagtcaatgtcagtggcgcagtcaccgcaacaaccgtcgctgaaaacatgattactggtggaatgacctttgccgccagcagtacctacatcggtcgcaaggcgaataacagtgccgccaacaaagctttcttcaacttcacggcaactagtacagttgggactggagaccgtaaagtcactattggtagcgctgctaatgttaacttgctaggtagcgcatcagacgcgactcggggtattttctatgaccagtatgatgccgtcacggtgggtaccaacgctatcctaaccgccaagatgtacggtaacgtctatcgggcagaaacagcaaacacgtttaccgccaacgctggcagtaaggtcacgtttgagaacttagccacaactagtagtaatgcgctctactacgttaccccgttgattccgcttggcaacaacagtacgtttaccgtgacgggtggcgagttgtatatcactagtagtggctcagcccctatttttggtggctacatgtccggtttgagcgtcttgctagattcccctaaggcctacgacattaaaaatacggactttgcgcttctcgttcaaacggggtcaatcgtcgagacgaccattaaaagtttcaaaatcacgaacagtaacctgagtatgtggtcattgtccttattgaacctgttgagcgccagtgtgacctatcaagggatcaccgccatcgaacagaacggggtcctgattaccaacagcggtagcgtcttaccgggactactcaccttctcggctgcgcgccgaattgcgaacaccctctcattaccgactgtgcaattcagctcaccgtatacgagtgacttgaacgcccagctcgtcaccaatgccgacaagaaggtccgcgttcgcgttatcaccggttatacagaatcgaatggcacacaaacgccgatttacgctggaacgggcacggcaaccgtcaagttaacagatgatcaaggcgcaacgcaaagtggtacgactgacagcagcggttacgttaatttcaccttagatcattttccaacggccggcacgactatgacagctcaagcaacgaccacctatacttcagatcctgtcaccataaccgtccaagataagacgccaccgacgccggtaaccgttaaagatggaaaaatcgttgccgaccaaaaaacgattgccagcggttccacgacgacggctggtaacacacttcgttacacggttaacgggacctccgcagctgatagcaacggcaatgccatcacagcaaccgctgccagtgatgggagttggtcccttgcgatgccagccactaaattaaaagctaacgacgtcattcagatttttgtgaaagatagtgcggggaacgaaaatccggtcaccagtacaacttatcatgatgccacgtttgccgccgctacccaatacaccgtcgcaccggcaatcggcccgacagcaccaactgagcccgagcaccctggtacgaccaataccagtgggagcgaaaacactgggaccggtaatacgggcgaacttcgtttagactacgcgcccagccaatttaactttggcagtgtcacaacaagtatgcagcctaaaacttacgccgcccagacaatcaacggtgtcgcgaaacagtggctccaagtttcggataatcggttagcaactcacggttggaccgtcaccgcccgccagaacagtccttttactagtactagtggcgcccaactcaccggcgcgaagttacacattcctgccgggcagacctataatgaacgcgctacgggccagctcaaaagctacgcggtcgatctcacaaccgccgaacaacccgtctttgcagccccagcaacggccaacgtggggaaagacctttcaaccaacgtctggcaacccacccaagttcaattgaccgttcctggcaacaccgcccaagcgggccaaacctataacacaaccgtaacttggacgctaacggctaacgtgacgaactaacaattaaatgtgccaaactgaggctcctcggccgtacaccttaagtactggccccaactctagcaattggaagcgcgacttcaaagcaccattagaccaccacaataattgtcgatttcatcacttaaatttgaccgtcgctggattgcccatcattattgatgacgcgacggttttttcctgtgagttcctaatgagctaatcatcagtaaccactagttttccatgtcatatactgagcttaagcaacacatcaacttaaaattgccaagtccgtataatgggcttggcaataatcaacctagttagtggctaaagtttgtaacgcctgtaaactagccgtactgagtacatccaccggctggcttaatcccggttgaaagaaaaagtcaccataggctaattgctcgagcgttgctcccatctggattgcgagcgaaacggtattgatgaccgccgttaattctgctgtagacattatttgtgcacctagtatccgatgagttttatcataaaacaacttaaaatgaacggtcgcattcaatcgagctggtgcggatgccaccaatcggggaaccgcgatgtaagttgctaacaccggttgttgcatacggacagctagttgcgtgtttaggcccgtagcagcaaagtaatatcccgccgcattaagcgcggacgttgcctgaacgccgggaaacacaattcgctgatccgttaacaagttatgcgctaataaccgaccggcatgactggccgcgctgcctaaagtgatccgctctttagtacccgtgggcgtaaaccgaactttagtcgcatcgccaatcgcgtaaatatctggaacacttgtttgaaaataatcatccgtctcaattaatccctcagaatctagcgccaaagttccccgtagccatgcagtattcggtcgattgccgactgcgacaaggactaagtcggcagcatactgaccacgattcgtttgtaccgctgtcacgtgtgttgaacctaatacggccgtcacccgctcttccatctttaattgcagcccattctcaacactcgctgcagctaaaatttgcgtaaattctgaatcaagattgtgactgaatggccgagcgttcacatcaataacagttacttgcttgccggtttgtttaaataaggctgcaaaattcatcccaatgtagccgcctccaatcacgaccacgtttttaatggctgctgacttagcggccaattttaactcattgatgctggcacggttttgaatcgatcgaacaccagataattcggctccgggaatcggtaactggattggtaacgatccaacgctcaataccaatcgatcgtaatgatcagtctgtaattgcccccgttgattacgagcagtaatcgtgtgggtcgctggggtaattcttgtgaccgtcgtttggtcgaatagagtcacctgctgggacaaggccaaccgctctttttcagcatccgccggagcccaatccaaagccgtcgcgaattgcccgtgctcgtaccaatgaatctcattatccgtattagctgctaataagccattgaccgtttcgcagccgccatgtgcagccccgacaataataatttttgccatattttccgcctctgattacttaaattattgttaacaacgctatttaagatacacgttgtctttaactacaacaatcgtttggctacggaaatcactattattaaggcacaaaaagcagtaaactgtttctaaaaccaattaggagatctttttgtgacccaactcaatcaacgtcgacgtggcaaccgactggaaaacgcgatttatgacaccacctataccctgcttagtcaatacggcctcgaccaggtcactttttcacgagtagccactgcggccgctaccagccgcagtgttctttatcgctactgggattcgacctttgacctcatctttcatactattattcatcaaatacaaaagactcccattgcacttacgaccacgccattagatactggcagtcttcgtaccgatctcattctgttagcgcaacgctttatccaacaaactagtacggggcccttccgctattttcggctattgtttgccacagccttgaacgcgcagaaccagcgcgatctcacgcagttagtgactcaaattgatcatgccaacttgaccttgatcgagccacttctgacgaatgcacaaaaccacggtgaacttcagatttggcctaaccaagccgcacaattagtattgtttcaacaattacggtactgcgacatcatcaaccaaccgatgaacactgatcagcaactcaccaatctcattgatcaagtcgttttgccggcattgcgagcaagtggcgttgctaaccggcattttcatcattaaagaacctcttcctcacaagtcaaataaagtctgatttcctagcccatactgcgttggaaatcagactttatttttaatattgaaccagcgtcacccttaactagccaaaaccaggcgacgcccccctttatccgtctaacaaattgtaatctggcgcttattgacgataatctgcccttcagccgccaattgtttaaactgacgactcagggtttcgggagtaatccccaaaatattcgccaattccttcttcttcaacggcaattcaaattcgatttgtccggattcaacggcacaatcgcgcaaatacgccatcaaacgcgctttagcatccagcaaatctcgtcgcaattgattcttctcagcttcaatcaattggttcccaaaattattgatcattgctaatgataaactggctgattcacctaataatcgctgaaaatcatcatattgaatggaacagacccacgcatcactcgtggcttgaataaatccctgattctcatgcggtgcaaatagccagtgttgtccgccgacatcaccactacgcaacaactcaataattttctccttaccattagcagctaaggcataaattttagccgttccctcatctaaaatgagcatgccttcctgatggtcgagtggctgacgaatcaactgccctttttgataaaatttccggtgatgggtcaccgtgattaatttggctttcaccgctggcgctagcggtgaaaataatggtgaacgactcacacaatccatttttgaatgcataatttctccttttcttgatctatgtcaatttttatatgattagactagcatatactgaccatataatgaagaactggaggaattattcatgactaaaaaatacgttgctaacatcgtcccgctgaacgccgaaggaatcggtactgccccacacggcacagcgactttcactgaaactggtaaccaattacacgtcaccattgaaatgttcgataccccggccaacacgcaacactgggaacatttccacggctttccaaatggcaaagcggcacagattgctactatggcccaagatgtcaatcacgacggctttgtagacttgcctgaaactgaacctgtttctgggacgacgatggtcccatttgataatgcgccccatcatatggacgtaccaaatgataattacccagttgccgacgcgcagggccacttcgcttatgaaatcgatgtgcccttaggcgacctacaggctaagttcaaagaagtcttcggtaccgatgacttagaactagacaagcgggtcatttatattcacggcgtcccacaagacttagccctacctgcatcagtcgctggtgaagtgggcatgtatgatgctcacgtaaccctaccaattgcagttggtaagattgaggttacggaagactaggcaattattacttaaactcacaaccaaaaactaagaccgcttaccactatcagttagtagtggtaagcggccttaattttttatgaaatcagcaaaagcaaatcctttatttgaattgcacgatatcattactatgttagactatttttaaccaacattaaattgaggtgttttcaatgaccaacgaacaacgagttattcatattattaaaacaactcctgctttaatgacgattcttcaattaattcaagactgtcatttaaaacaaggcgcattggcggctggtagcatccgtaatactgtttggcaagtactcagcgggcagccagtgatgttcaacagtgatattgacgtcgtcttttttgaccctgagcgaccagccagcgatgatttaaaaatctatcagcaacttactgataaagccccacaataccaatggcaaataaaaaatgaggtctatatggcacattataattttgataaggatcccgaattcacttccgttaccgatgcaattggtcactttgtcgaagttccaacttgtattggcgcctttttagacgaaaatcaaatcaagctaatcgccccatacggtgtagacgatttgataaactttcgctgttccccaatcccctactatcgccaggatgccaagcacatggcaatctatcagcagcgaatggcacagaagcagtggcatcaacaatggcccaagttacaaattgatggtatttgaaatattatgcatacccttaatttacgtcatttaggccaagtcagcttttaatattgcccgctgcacgtccaacgtttctaacaaactgaccgcacagtcagcacccttattgccactcttaaagccagcgcgatccatagcttgttcaatggtatccgtggttaaaacgccgaacattatgggcgtatcggttgccaaactgacggtcgcaatccccgtcgtcacgccacgacaaacatagtcaaagtgcgcggttgcaccccgaatgactgccccaagtgcaatcacgccatcatagcgcttggttgtaatcattttttgaaccgtcagtggaatctcaaaagctcccggtacccaggccacgtcaatatcggtttcattgaccccatgctgtaccaaactttcttgtgccccagttaaaagctgctgcgttacaaacgcattgaaacgcgccacgacaatcccaatcttaagcccgttgccattaattttgccgttaaaagttgtcattcgtgtccctccgttagtgtgagttgatgatgaaatcgatcacgttttgtttttaagtaagcttgatcgtactggttggctggtatttctaaggggacccgttcaacaacatcaatccccgctgcacgtaactgctcaaccttgtcaagattattagtcagcaaacgaacccgtgtaatccccatttggcgtagcattaatgccgcaatatcataccggcgctcatccggttgaaagcccaactgcacgttcgcatcatacgtatcaaccccgtgttcttggagtgcgtaagctgctagtttgttagccaagccaatgccgcgaccctcttgccgtaaatagacgaaaacaccgcgctgagcttgactgatcttttggagtgcggcgtgtaattgatcaccacagtcacaccgccgcgatcctaaaacatcgcccgtaaagcattcagagtgtaaccgcactaacactggttcatcgccactgatatcaccagcttgcagtgccactggcaacgccgtatgaccgggggcttcgaaaccagtcatcgtgaactgaccatccttggtcggtaagttgacactcggggtcgttgttagctgggcggcacccgtttgaatcacgtaggtggtaatatcttcaatggtgattagcggtaattgtaagccctctgccaaagctttgagatcacggcgccgcgccattaagccatttttcttgataacttcacaaatataggccgcgggggtcacacctgctaattgtgctaacgtgacggccgcttcagtatgaccacgccgcgctaacaatccaccagtccgcgcaatcaatggaaaaacgtgcccgggatgatagaaatcagcggcctgactattgggattggctaacgcttgaatcgtggtcgcccgatcagctgccgagattcccgtggacgtcgtatggtgatccgttgagactgtaaatgccgttccaaacgcatcgtgttcactagtcatcggtgtcaaatgtagtcgcgtggcgatacttggcgccatcggaacacagagtagtccccgcgctgatgtaatcatccgattcactgtcgcagtggttgctttagcggctaggccaaccatgtctccttccgcttcacgcgtctcatcatccgcaacaataatcaattcgccccgttttaatgcggccaaggccgctgctacctttttcattgtatccatcttaatgactcccctctaatgctaattgccgggccaagtacttgcccagaatatccgtttctacattcaccagcgttccaacttgtaacttagacaaggtcgtcaccgcttgtgaatgcggaattaaatcgacttcaaacgttgtctccgtgaccgctacgaccgtcaaactaaccccatcaactgccaccgaacctttagtgactactagtgcgcgatattctgacggtaaactgatcaacagacgcaacgcgtgcgcatcagattgtcgctgcatcacttgaccacagtaatcgatgtgcccctgaacaatgtgcccatctaagtgcgcgttcacttgtaacgcacgttctaggttcaccaatgaaccgaccacaaggatctttaagttcgttcgacgcaccgtttcaggcatcaccactacactgaaagcatccgcttgtcgggtcgttaccgttaaacaaatgccgttcaccgctatactgtcaccaatcttaagactcggtgtcatcagcgacggtgcggtaatcgtaagggtcatttccaacccttgttggtgcacttggctgacgcggcccttggtttgaataattccagaaaacatttacttaacttcctttcgaacggcccgtagccggatattcgtccctaaacaagttaccgttggttgttcaaatgtcaacggtgtcatcgcagcggccccggtaacggctggcaaacccgtcccaccaatcatcattggtgcgatgtagctgacccattcgtcaatcaattcagccgcaacaaattcagcttgcagatgagccccaccttcaactaagagtgactgccagccttgttcgacacatagttgactgattgcagcgggtgtccagttgccaatcaggacgtgtacattgggactgtttcgaagttggtcgtcactagccgcagcctgacgacaaagtaaccaggttggtgcctgaccgtcctgaacaagccggtggtttaacgccacggtactcgtattcaacaccaccaatcgaaccggtggctgcaccattgccgtcagtcggacggttaattgtggatcatcaatcgttagcgtccgttcaccaatcagaattgcttgaaactgtgaccgtaagcactgactatcgatataactagcatgattggaaaccagcgtccgagtcggcgtttcagtattaattttgccatcaagcgttatcgccgtttttagggtgatccatggtcgctgctgcacataaaaatgattgtagtgggggttcaacgcgcgaactttgtccgttaaacagcccgtcaccacatcaactccgtggttcaaaagatactgacgtcccttaccacccacgattggatggggatctaattgaccaatcacgacttgccgaattccagccgcgacgattcgcgcactacacggcggcgtcttcccatagtgtgaacaaggttccagtgtgacaaataacgtggccccacgcgcctgttctggtgtgacctgccgcagcacatccacctcagcatggtcaccgccaaaataatgatgataaccttgagctaacacgtggccgtctttgactaataccgcaccgacctggggattttggtacgtcgccacccccgccaatttggcttgatcgatagccatttgcataaaatcagttaacattggttcacctccaacaagataaaaaaacacccaattatcaaatcatcgataatcgagtgtgaagtgttcgccaaatagatttcaccagtaggatccagctaaataaacctacttaaaggtcgccaatagccactactgcctagtaaaattcaagcaataattttcttctcccatccagactatactgtcggtcccagacttgcactgggtccaccgctcacgcgggtcacggacttcaacttacgttgttaccgtcggtcgggaattgcaccctgccccgaagaaatcgtattcagttttcaccttttataaaaacactttcttaatcaattgtcaatcaccccttttagtttaacctcgtgaactgctgtgttaaactgctagcaaactttataaaaatgataatgactaacactaattcttaacttttttcagaaaattgttcgcttttcttaactagttttcaagtttcagtacggtacaatgaaatcattcataatatcggagttgaataaaatgtggcctaattatcaaacaaggcgctggcaagtggcagtgacagctggattactgtcccttgctatcatggggattgtcttcgcaatttgggggatcacgcccttcggtaaccataacttattaattagtgatatgggtggccaatacttatcatttttcaccgcgtatcggcatgccattttaacgcatagttttcaattatattcattttcacagtcattaggcggtaacgcactacccacgattgcttactatctattaagcccatttaacattttgatgttgttgtttccggcggccaatttgccaaccggacttagtctactcatcatgttaaaaatcagcttgattgcggtcactatgacggcttttttacaaacgcattttcaaacaaagcggtggtcgactgccatttttggtgttgctttcagcctctctggcttcgttgccctcaactattttacgatcatgtggttggatgcattaatttggttaccactggtcattcaaggactcgaccacttaattgcaactagtcatcccgggcgctttttcggctggttatgggtcagtatcgtcaccaattactacttaggctatatgacttgcctatttgtgatttactattttatttatcaactatttgaacgcaaacgccctcaggacagtctttggcaaactgttcgtcatcaattttcgttaattcggcacgtcgtggtcaccatgctactcagtgggttaagcacgatgtttgtcctgatccccactggtttaggcatgctgaccacggctaaatctgcggtcaaattatcgagctacttaccggtcccacaattcggtttagctgttttgagtcaatttggcttaggtgccgccaattttacgactcggctcgtacacgcaccaaccgtcttcagcagtagtctggtcgtcttgctggccctaagtttctgggtgcagcccaacttgactaaagctcacaaatggcatagcttcggactattacttgcactcttcttgagtatggacattcgtaccttagatacgatttggcacatgtttcaaacgcccgctggctttccataccgcaatgcttttttctttagctttgtcttgatcatgatcgcttttgaagcctggttagcaggtccccggcggatcgccttgcgctggcaatggttgttaccgacactcatggtcagtgcgctgatattaggctggtttgcccaacgaactgctaagcaccccttaacaacttcaacgctggcgctcagcttagtcgctgtcatcttaaccgcaattgccttattcgcaacggcgaagcggtggcaaacgctcagcttggcaggtatcgtcgccttagaattagggactaacagtaccctcatgatggcgaagtcaccactagggaatcaggctaaatttgtaactgcctatcgaaccgaataccgccaaatgcaagccgtcaacgatcctgatggtcaattataccgcgttgaaaatcaaaatacgctaatcaatcaggcctacaattatgatagcaagtatcgtaattacaacgacccgatgttatttaactttcacgatattacctactacagttcaacttttgcgaaccaaacacgtctcatgttgaagtcacttgggctattttctaaaaacgcccggcgtgtcagttcagaaggcctaaatccggtcactgatttactcttagatgtaaaatacgctgtgcaattaaacgccgtgggtcaagcgacaacgcggctccgtagtcaaaacgggttagggtttgccgtgccaacagcatttagacagttaaagcttcgtcagaatagtgccattatcaatcaagaacgcctcttacaaagtttgcggccatcgaaacgcgcctattttggcaacgccacgacgctctcagatcacgtcatccaagattcacaggccaaacgctatccgtatttgcatacggttaaattaaggatgacacgcaccgggacgctgtattataacgacacgactcgtcaaacaaaatacaccacgatgcgggtcaacggtcacttagtcccgactaagtttaatgccaacggtgagttagtgctccgatcgctaggttattttgacaaaggcgctgtcgtcacgttaacggtcaaacgtacccaaccaacgcttggcacccatgtccacatcgccagcctggatcaagcccggttcaaccaagtcaaacagcaactgctatccacgcgctttacaccgacttaccacgtctcgggcattcataccgtggtcagtggtcaagtcaccaatcgctccaagcaaaagtggctctacgttgctattccagccgacaaggggtggcgcgccacggtcaacggcgtcaaagttactcctaaaacggtcattggtgggatgttagccctaccgattcagcccggtaagaatcagattcagctaacttaccacgtcccgggattgctgggcggactactgatttcaatcataagtggacttagcttcattctttggcgtcaacgatatcgccaccattagaatcgtgtcaatcaaaacaatcggactgccaagctattctgctaggcagtccgattgttgttttaatggtcgccgtaactgctaaaccagtcgcgttaatatcggttttagataggacacaattcttatattagtcaaaattaattcaggtttcatccaaagaaaggccatatgttcagtaagttctaagttgattgccggtctagtaacgaatgcctgtgtgctatacactaaacgcgtgtacacctgatttttagccttgtcaaaggtggcatcttcccaaataacgcgctcagtttgaactttcaagcctgtctcttcccaacactcgcgtttggccgctacttgcggtcattcattagctaatgcactcccaccgggcagatcccaatagctggcatcaacattcggccgcccacgctcaaactgattgcgttttaaaattaaaacgtcgtgcccggcagtcactaaagtatgcgcaataatttgaaccatttgaattcacctcaccttgataagtcacccaaattaacggctattatatttcgtttaaccacaaataaaagtcccaacactggcaacaccagttattaagactttcgcttcaagttttattattcagtttctggccgtaaccgacctaacgccaaaatggtcgccagcgccacacagccgacaactgctagactggcggcacccgttgttaacgcgtgcggcttaataaactgctgttttatcacgacttgtaagtacgcgtgccgcttagccgtcacccggcctgttaacgggctgtagttggtcgccatcacaccataccggacgggcgtctgaccaatgtttttaatcgctaatcgcaggttgcccgccgctgtcaacggataattcaaagtggtcagctcattggccgagccccgccaccgtttgacaacatgcgcccccttagtcaaggtaattgttacgcgcccatgcgtcgcaactggcttcaaccgtaaaacattacttttaccactaacggctaacggcgttgtaacagcgtgacccggtccaattttttgaaccgtggacacaacataacgcccatttccctgattgccacgtaccacatcagtaatccgcgtcgcctgactcgtctgccacaaactaaccacactgattgccgccaatacgacgaccaaccacgtcagttggcgccgcattactcggttaaggtgccacaccggcaactcacgaccacccacaatactgaggagcatcaatcccggtaatagcggcaacgcatagcgcccttctacttcccaaagtccgacatgaaaagccgttaaaccgagaattgccagggcgacgaacgtcacggcccactcgcgccgcttcatcaaagtcacgattgcttgcaccagcatcgtcaggtaaatcgtttgcgtcattagaaccagccaaaattgaagctggcgttgatgattcaaataccagcggggcgcacgaatccactgggtggtcaacttaaagctatcaaaatcgccagtcgcccagaagacccgcatctttttgagtaaatgtacgagggtccccgtaacgcccatctgatgtaaccgctgctgaattatttgctgggtctgttggcgcttggccgccgcagttggcatctgattaacgcgcgcaaaatcgccatgtcggtactcacccgagctttgggggttcaagctcatcgcaatccagctggttgccggtaaggcggcatcagcttggcgcgtataacccgcttgctgttgggcagttcgcatcaccgcaaacatcaccccgagtgtcatcactaaactaacgagccagcctaacatttgccgaccactgaattgtcgttgccaccacaagatgatccccatcaatacgagagtgagccagagcacaatgagattagtcttcatcaccacgcccacggccaccaataacccatcaccaatcaaaacgccccaacgacgccagccggttaagcttagtccgagtgtgagcaaggccaagctgtctggaagtagtggcaaaacgagggcgtccgtatatgcaaatagtccaaatgcggccacgggaacactgacgagccacaacaaactaaatgagaccgcccccggttgccagtaacgccaacggtttagtaaatataacccactgattagtccggtatcgatccagataaatcggatgacatttaataatacccagggcgtctgcgtcagtttcaataatggcttgagcagattcgcaactaataacgtaaaattcacattattgggataaatcataaaataatgttgccaatgatggctgccctgcgctaataacagtgcctgctgccgaacgaaaaacgggtcggcccgcgccacgtcaacaaaactagtggcaatcaatatttgcacgatggcgattaagccgaccagcccaatcaacagccaacgatactgacgagatgataactgtttgagcacctgccggccagccatcgtcatgaccaataatcccagaaccatggctaattgaacgaccggtgacgcccagtccgggttgccgaagaagtgaatcggttgcaaccacgccatgccaactgcgacgaccaataccgcggccgccagccaattgacgctcttaaccacggccttcatccgtgcacccgttgcgaattcacaatagctggctgttgagttgccgtataatcatccgtttcaataatatagcggggccggtgcttgacttccgcaaaaatttttcctacatactcgccaacaatactaataccaatcaattgcatcccacctaaaaaccatagacttgtcatgagtgaggaccagccactcgttgcggtccctagtaatccttgtattagcgcatatagcatcatcatcaaactaccgccactaatcaccataccgaacaataaaattactttaatcggtgcgattgaaaatgacgtgatcccatcaaaagcaaaagccaccatcttacgtaatggatactttgaaacacccgcaaaacgtggttggcgatgataataaagtttagttgttggaaaacctagtcgtggtacgattccacgcaagaataaattggtttcctcataggttaacagtgcctgaactgcccgttgacttagcaaacggaaatcggcatgattaggtactaattgcacaccaatacgcttcattagccgataaaagccgtccgcggtccatcgtttgaaaagtgaatcactacttcgatcattgcggacacctaatacaatatcactaccagcacgatagcgtgccaccatttctgggatcacctgtgggtcatcttgcaaatcagcatcaatcgtaatgactatttcagcagtcggactggcgacctgcatcccagccatcaacgcgttttgatgaccaaaattacgactaaacttaagacccgtcacggttgagtactgtttttccaacgacttaatcagtttccaagtcttatcttgactaccatcgtcaacaaataataacttacttgccgcattgacctgtttgtgttggatcagatccgtcaagataccatccaagatgtgtgcagacttaggtaacaccgcttcttcattgtagcaaggcacaataatggttaaccgtggattttgcatgctaattcccccaatatgactcaaatagttttacgaaataacaattataattgcaactttcggtatcattagcgccattcgattgtggcccaaattagacacttaacgaaaaacattccggtatcattaataacgcagaatatctgcccccacaactatccacgactaattttataatcattaatgcctgacacccacaatcctcaaaggcaagcttacgactattactgtaattatttatctcaatcatccaaccattgacctaggcaactgtcagtggtcacacagctcaatagttcaaattgatagtaccaatatcttcctcgcaattcaaacaaagcaacgatttcggtaccaaccattaacaaattatccgaacttaacccccgtgctagtaccacccattattacgaaccggtacaaagaaaatgcggaaataaccttgtgttacgaaccattcagaattccaaccgaatcttcaaaaccggtttatttaagattaagtgacggacttattattaaccacaacaattcatttaagctcacaaaaatgggccttcataatttctgaaaccccactgtataactctaaatccattgcattctaatttcagtcaaacaataacttatttagctggtaaccatacaagcatcaacaacaataaggcaagtccaagtattgcaatgagcaagctctggtgattctcgctcgtttgtggtaacgttactgccttcgaaacttgaccggattgatctgtggccacaagctagtagttaaaaacaaattgacgttgacccccaaaatctctaaaattaagccattagtctttttactaaattaactttaaggagtatcttcatggcacaaatttatattgctagtccgtttttcagtcccgaacaagtgacgcgggtcacacaacttgaggaagctttagcaaaaaatccaacggtcacggatttttattcaccacgtctacaccaggacgctcaagccgaacagttcaccaaaacttgggcgaccgaaattttccaccgtgacatggcccaaattgcggccgcgcaagtcatcgtgactgtcttagactttgaagccaaaaacttagattctggtaccgcctacgagctaggtgtggctaccatgcgcgacttgcccatcatcgccttgcaggaaaaagatgaggccgtcaacctgatgattaccgaaagcttacactggtataccaaacaagtgagtgattttgaaacttacgacttccaacaattacctaaaggcgactttatcggtgaaattttataataaaaaacgaagccagactttcgactattatcgaaagtctggcttcatattttgtagttcttaattttacttaccagtgggccccaatcgtctgttgccaagcaaagtacggggtgccctttgtcaatgcttcaaattgatcagccgtcaaattgggccagtctatgtcactggttgccaattgtaacgaatcggttaagtgaagatgaaagtcggtgatccaagccaacagcggtttcaacactgacaaatcggtatttaacatctgataagtagcggtatcgctggtcaacgtcaccgccaatgtgtaacgggccttcattcgtacgccattaccaagttgccgcacgattgagcgatacaatcccagctcgacgtccgtgatgactgtgggtattggcgccaaggtttgaaagactgtgccgcgctcatcggccaaactcagccgactaggcgtgatcgtcaaacgcccatgagcagccgcgccctcattcaacgctttcaagataaacggcgtctttttgcgcgcggtcgaatacttgtgatcatttaaaacaatcgtcatataagctggttggtgcgtaatattgtccgcaatgttcgtcaccgcgactggcattggtttttgcatgtgataatctcccttgtcgatctgcttctctctacggtcgattatacactaacacgactcaaccaacgtagcgacttaataattgccttaggccgtcaccggatcaacgtgctcagcaacagcatgagccgccgcgattcgaccgaacgtaaagatatcactaagcgagttaccacctagccggttacccgcgtgaattccaccggctacttctcccgccgcgtatagcccgtcgataatctgaccgtccgtatttaaaacgtgagcatccggatcaatcttcaagccccccatcgtgtggtgggttgctggtttacgcggcgttgcgtaaaatggtgccacggcaactttcaaatcaaaggccgtcttatgaaattcaggatcctcgccggcatcaacgtaacgattgtaatccgcaatcgtcttggtcagggctgccgggtccatgccaatttgttgcgctaaatctgtcaaagtatcagcacggaacaaggtcccattcgccacctgctggtcaattttagcttgtgtcgtgttgtaagccgtctttttaatttcatcatcggcaattagatagaagagactcccattatcaatggccgcctgagttaactcatcacgactgccgtactcattgacgaaccgttttccttgctggtttaccatcacaaagtttgccggtggcacttggagcccactgaataattcgccggtctccggatcagataccggcatcatttgtgagaagcccatcccaactaatgctgcaccaacactagtccctagccgaattccatcaccagtcattgcgggggaattagtcgtcttgacatcatcgtcgatggccgtccagtacgtattgtacttttgtaacattttagtattcgctgcgaaaccaccagaagctaaaatcaccgcatcagcatggacaataactttttcatgagccgcattagtcgcaatgacgccacgaacttgcccatctgtcaccagtaattcttttaccggcgtttccgtcataatcgtaccaccctgttgttcaacaaaggcccgtaaagtcttgatgtaagcaaaccctagatcgcccattggcttatgcccgcgccgccagatggctccaactggcattgtcacttggctttcatcaaatttcacaccaatcgattgtaaccacttgactgaatccagggcgttatccgtcaattcttttaccaaatcatactgaccgtgaatctcttgaccgttcaaatcagtccgttgaccacctaaataagtttgaatccgatgtaacaaggttgaatcaaataaggtgcccttttgattggtattggcagtcaggtatgcgtcaatctgctgtttcaatttacggaaatcagcccgatattcaggtgcaattgtactttcatcacgctcactcagatccttcaacgtttgcttttcacctggcaaagctacaaactgtcgttgccaatccggatcagccgcattcatgggccccccagcgcgaacggtattaccaccgacagctgggtatttttctaggacaacggcttgatgaccagcctgtaacactttggccgctgccgtcataccagccccaccagcaccaaccactacgacatcagtcgtcacttctttgacagcaggttgagcgacctgcttagtcgcacgccgtttcttcaaatcatcaggattggcaccagcttctttgaccgcacgagcgaccccatcgataacaccatgactggtaattgaagccccggaaatcgcatcaacagcgagcgtttgacccgcaataatctccttgggaatgcgttcaaaagccacatcggcaatcccctgcgtttcactactggtatcaatttcaatattttcaatccggtcagcggagagggtcactcgcattggcaattcgccattatgtccagtggccgtcacctgataagtacccggggcaaagctaagcgcttctggtgcccgcatctcggcgacgatggtcgcaaacttctgaaactttgcaaaacaactgtccagaaaatcaaccgtcccttgcacctttaaattaccttgatcgtcaaaagccgtttgggcacgacctaataagaattctgaaccgggcatgacactggcgttaacaccgggagcgtctaaaatctggcgcaggtgtagttgcgcgcgtgacgatccttggacactgtatgaagccccaacaatcattactgcttgaccatctaatgggtgaattttgaatgataaccattcaataatgcttttcaacgcggaaggcacggaatgattgtgttccggtgaggcaatgataaccccgtcagccgccgcaattttagtggcaaagttttgaatgatggtactgtcagtttgatcattcgattcatcaaacatcgggacatcagtcaattctaaaatttcgatttcggcttgtgtcgcaaaatgtcgttgcataaattccagcaacatccgattgtacgaatgctgagcattcgttccaacaattccaacaaatttcatgtttattcctccccagtcacttgccgccacgagaactgcttactcttttcgaaaaactgactcgacggcatgattttattcgttaaatctacaaaatcaatgaattcgccaaacgcattgtctaattcctgaactttatccggataagtcaggtcgccctgatcatcaaaagcttgtagtgaacggcctagtaagtattcaatatttggcatcaccagtgcttttaattccggcgcctctaaaatctggcgtaagtgcgcttgagcgcgtgaggttcccagtgagccgttcgaggccccaacaatcataactggtttattaattaacggccgcgtggtatatgacagccattcgattgcactttttagtacggccggaattgaatgatcatactccggcgtggcaaagatcacgccatctgctgcagtgatcttatcactgagctgttgaattgctactggtgctgttcggtcttccggttcattaaaagccggtaaatcttttatttcacaaatttcaatcgtggcttgttgctgaaaatgccgttgcatatattgcagtaactgccggttggtcgatttggttgcattcgtcccaacaatcccaacaaatttcataatttcagatcctttcaggatgatttaaacagtcgttttcgacgagtagctattgaatgattggccactcttaatactgattagtgtacgtgaaagcgctccgcttgtgaaatatttatttatctataccccgataacaaatttactatgtcgacgattcgcgttaaaattaatcatgttaaaatggttggtcataatgctatttagccactatcgccaggatgttgacagaacttattgaacatgttttgaacgtccttatggcgatgcaactaactcaacatgaccaaatcagcaatcaaacgaatactcacctaattacaatgcgagaggaaggcgctttatgccaaaatcagattctagcgaaatgcgacggtttttagatgtgttgctcaagcacggcaattttacccgggcggctaaagatctctacatttcacaaccttacctcacccaaagcatccgcaatgttgaaaaagaattgggcgtcaccatcatcaatcgtgaagtcacgccactgcgactgaccacggctgggcggacttattatcaatatttgacggcgctcgaaaacgagaaggattactttaataagcaaattaggcaatacacacatgccaaccagcaagtaattcggctgggcgtcttatctagcctcggctattacttattgcccctattcttacctgcttttttgaaagcccacccggccactaagatcgaattaaccgaagatatcgctagtcgcaacgaacagcgcgtgctccacggtgagctggacttcttaattggtcaaaatccggaaaccatcgcgccggggcttgaaagttatgaccgcggtcgggacgggtactacgcgattatcccgaacaccgtcaactggtaccaaccccatcaggccttcattaatccgggagcgctaccccttaacgacctgctacaagcgcctctagtcttgtctccccacgggtcatcgattcgacgccaagttgactacttattacaaaagcacaacgtgacaccgaatatcgtaattgagagcacgaataccgccaccatcaccaaactagccactgctggactgggtattacctttttaccagacagtgtgcatacccagcctgatccagaacgctataacatcttacctttgccccaagcgttaatgtccctgaattatttcattgcctttccagccgagcattcactgaaccaggtggaaaaagacttggtgacgatcttcttaacccagttagaagccgatctggcacaatcgtcaacaatttcatgatacaacaaatacccatctgcttagccgttaagacggccaatgtagatgggtattttaacagtaaccattatttcaaagacgcaccagttaagatatgcttttcgttgcgaaattttgacgccacgcctacactttagctaaccaatacatgctaatctagtcacgaaaagtaaggatggcttatcatgataacgaataaatgccgttacggactggtaggtctaatttcgatagtcctaacgtttggtctttccgcttctaatcggctccgtgcgtccttcaacgctatgccggctatcacctacatgtcaaaatatggcattatcaaccatcgcacgcaatggcaagccatgctacatgcgactgatcatggtcgcaaaatcacgtcactgacccaactcaatcaaattctgcgcgctgcaaatttacattcattcgccgtcgccaatctccgccaagtcgaacatgccacccgtccgaccaagacaatgagtgccggcctcaccatcatcaatgtgccagcattttacagcagtcagcaccaattacaaaaacagtattggacacaactccagcacctgattaaacaaactaagccgacaaccgatttaatcttaaacttcgcagccaatactggtggtagttcggcaccgatgattgctggcctggccgccatcattcccgacggcctcctctacactggcatcacgaaccatcatcgcaaccggccgcgtgtgatgtaccatggccgcatcactggtggacttggtcaagatgactttaacttttcgcaaccaacagcggcccactttcgtcatatttatgccattattggtaaccagacagcgagtgccgcggaggtgaccatcatggcgctaaaacgtaacccgcacgttactttagttgggcgttcttccgctggatatactagtctcaatggtggcgtctttttaaataccgccgtggccgtcatgacgattggcacgctcaaagcgaccgtcaaaatccatggtcagcaatacttcaataaccagccgttaaagccagacataccaacgttatatcagccattggcaccattacaattaggacaatcgccccatttagatgccgactttctgtccgagttacgaaccatcatgaagcactaccactgacaccccgtcctttcagcttcaactactagattcacaaacttcagcctagtcaatcggcactattgtgattcagttggccgttcagctgcactaaaaaatcagcttacgcagccaccgccatccccaaattacaattgtaatcagaatagctgtgaccagccaagcaactaacacgataccaatactgacggtagctgccagtgcacggttcgccatcttcacagttgccataccaggcacactctcaggccgcagtacaccgtaagcgactaagcgcattgcaatcaaaacggtactataactcgcaccaagttgccaagctggccgagccgcgccatcttcttcactctcgtcttcatagtcgtccgccggatcaaaccgtcgggcccactgttcagttgtcaacggatctgctaaatcccagtgttgccaggcatccgcccagttggctgtcgtctcatcattgagcgtgtcatcgagcgtgcgttgcatcaatttattctgcaaagttgccttggcagtcaaatcaccgtcccactcaagctgatcaaataactcaatcgctaacgacaagccctgcatgcgcgtaattgcggccggatcaatctgacttttcgccacaagctgtgaccattgcgcgtccaaatctcgatcagcacttttttgccattgttcaagctggttaaccaattcaaaaatctcaaaagagtcctcagtatcctggtacttatcgaaaaaggcccacatcacggctggtaattgttcagcagtcaacgtcagcggggcggcaaactccggatgcatgctctggcgatgtgcacgccacacttgccacccggcaccactgacctgagtggccgcccgtttaccaatttcttgcagatattcctgatcttgtgcctgcaaaaacgcgttcatcgctgcataggcttgaacttcttctaattgacgttctggtcgtaccccagctggcagcactaattcatcctctccgtcggtctcatcaacttcatgttcagcatgatcattgggcgtaagcacggccctaactgcccgcttccatgcttgccacattggatcatccgccgttacctcataaattgccccggcttgcatccgatttagtagtgacttgacggcgtcatcgatttcatcgtcgtcaaattcatcctcaagtcccagatagctagtttccaaccaacaatccgcgagccaataaaatgtcgttacatatgcttcttgttcgttcatcccgataatctcccctaatgcgtgcaattttaaatcatttgtctctgtgacggtcccgtcacgtgccacagttgccggattatcgtttaatcaatcagtctggccgctagattacgcgcatcgtgcacgccaatactgctcaacgtgccctaattcaacacgtatgcaatggtcaacgataacaactaatcactcgtagtaacttatcatgtcaggatattaattgcaattaaaatttttattttatctttaatgacggcccacgctaattaatggtgcaccgtctcacccaccccaatggaattcgtcatcaaaaataaaggtcacaaaaaaactgttaaaatcattgatttcaacagttctttcaaacaccgtatcgatttagttagttttgttcgtctggtaattcgcccttcgtttgatcaccagttggccggtaaaagttacgaccatccatagcaaagatccgctccgtatacgtgcccggctctgcgtgtccaagtgaagtctgcatcatttgaatcgacgcgtccaactcgtccaagtcatgtaagatttcagcttccataatatgaggccgaacgggtgacccatattctaacaaaccatggtgcgcaagaatcgtatgccgcaagactaaaacagattccgactgctcgtcaattttcaactgttgacaagtctccacgatttgttcatcgatcaggacaatgtgaccgaccaagttccctgccaacgtataagtcgtcgagaccggccccgacatttcaatcgtcttacccatgtcgtgcaaaatcgcaccggcgtatagtaaggcccggttaacgtggggatactgatcggcaactgccttagctaagcgcaaaattgataacgtgtgataggctaagccaccggcgaacgcgtgatgatttttcttcgccgcgggatagctaaagaaccggtcatgaaatgtcgttaacatgtggcgaacaattcgattccaattaggttcagtaatttcaaagacaaactgattgatttcatccgccatcgtgtcggtctttagtggtgcgtgttccacaaattgttgcacttcttgcggttcgccactatgagtgagccgcatttgttgaattttgatttgcggattaccctgatagttttcgcgtttacctttcagatgaacgatccgacctgcctgaaagttttcgacatctgtatcgcttgcatcccaaaacttcccggaaatctcgccggaagtatcctgaaaattaatggctaaaaacttcttgccgttcttggcgatgcgaacttccgaatctttcaacaaaaaatagccatccacggtttcatctaattgataatcaaataacttctttgccatgttatcccccctaggttaactgctgtacagtcgctgtcttcagttgggtcagtgccgctgtctcattcgtaaagtagagcacttgatgatgctgagcaactgctgctaagacttgccaagcagcttgcttacgttgctcatcaaaattcaccaagccatcatcaatcattagtggtagctgagctgcttggcccaaatgattgatcaacgctagccgtaaagccaagtacaactgttccttagtcgccgttgaaagttccgcgaccatgaactgcgttgttgccgtcttcacaaccatttcatcaccgtctaagtcaatcttattataccgctgtgccgttaattgcgcgaaaatcgtggttgctgcggccaaaacagttggtaattgctgttgtgtcaatgcctgtagcgccatatcgatccagttcgcacccaactgccgcgttagccattgacgtgccatgactgtgatttccgtttgtagatccgcctgttgctgacgtagcgtagcgtactggccatccgccgtcaactctttgagttgtgcttgcgccgtggcaatgtccgtagctaactgtgtcagttgctgcgccgtttgggtacgttgttgctgtctttcagccagtaccgcttgcaacgcttcaagcgacgtatactgctttaacgccgatagctcagcagaactgagttgttgctgtaattggtgacgactcgtggcgttggccgtttgcttttcggcatcactaaccgctcgcgtcaacgcgtctacatccgctaaaccgttagtcgttgctaacgcctgtagctgctcggtcagatcacggacctgctgcgtcaactgctggacctgccgctggacaaaggcaaagtcggggccggacatggtctgctgttgcatcacttgatggacttgatcatagaattgggcaattcgagtaacacttgtcgttaaatgatcctgatcaacaggaatccatcctgccgcaaattgataaggctgaatcaattgccagagtttggcagcctgtgttgctaatgcttgatcagcagtcgtgaccgcagcttgtgcgcgttgcagtgccgcgactagttccaattgctgtaaggcttcactggcagtcagattcggtgccagaccagcagccactaattggtctgataagtggtcggttgcttgcaccggtttaccctgactacgggtcatcccaaaccaaccaagtagggccacacctgctaacatcaagatccatttaaagccgcctaatggtagcaataatcccgcgacaatcccgattgcaccaccaatcaagcgccaatcaagcgatggactattcggggccggatgttggcgacgcgtgttcgccgtcgctgccaacgtcgccttcaaggtctcgattgcggcctgtttgtgcggagagaggcaacctaacagctcaggatgtgcattactttgcgcttgaaaatcagccttggcagcacttccctgctgggtcaacgtttggtattggcctaaggtttgttgcagggttggtaactgagcttctaattggtcaaactggtcttgatgttggacgtagaagccaactagtccttgagattgtgtatcaactggttgctgacttaattgctgacgtgcactcgccaaggcgtgttgcaattcctttcgctgttggcttaattgttgatagcgtgtcctagtcgccgtagttagtgtcgtcgtcatattagtggcttgcagttgctgcaattgttgatagaccggccactgatttcgtaaattggcgagctgttgttgttcatgatccaacttggttaaatcacgttgggtacttgtccgttgtgcctgcaaatccagcaatcgattttgtaatgtttcgtattctgggtaccgttgcttggccgccttgacctgttctgtcaacatgcgatagtgctgcaatgcttgattcaacctgggtttgcggccgcggggcttatataacgcctccgcatctgtccgtaacgtagtcgccgtttctcgccatggtgcactgcccaccaatccgacttgttgtaattgcacgttcaaatcgctggcgtgcatagttttgagcgccgtcaattcagcctggttaaacgtaaacaatcgcaaatactggtcacgatcataaggcgctaaccacttgtcaagtaaggccagcggttgagcggcctgcgtctgcacgttcaccaaggtagcgggttgatcacctaaccgggtcaaccggtatgtcgtctcgtcaaccactagctctatcgaaccaccgtactgattcgtaccttgtggttcatggcgttcaagtgggtgacggcgggagggaaaaccaaataacatgccgagaataaaggcccgcattgttgatttaccactttcattgaggccgtaaatcacttgaagcccatcaccaaactcgaactgctgctgttgaaatttgccaaagcccgcaatttcaagacgcttaatctgcatcatcattcacccccgtcgttaaatggtactgatcatttaagagtcgcaccacttgttgttgccaagcagtgggtgacatatcttccagcaacgcggtgttcagaaagtcttcatccaagagtttgcctgcaagttcagcgactgcttgatcggttacgacctgctcaccaacttgttgccaggtcgtcgcgttaataccaaacaagggggtcatcgtatccgtcgttgcttgctcaatcgcaaccggccaccaatgttcatttgcctgttcctgcaactgggctagaatggccccctgatttaaggctaattccgccatcgcactcagttgaagactagctggtaacgtaatcgttactaattttaagccggtaaccatcttcaatgataattgatcagctaactgatggacgatatgtgaacgggacatgggttctggactagtgagcgttggcgtccaatccgcccattcaatatcagtcaaggcgttaaatactggttgcaaggtctgatcggcctggctattcacaatgaggcaccccttcgccccagtttcaccgcgatggcgcccctgcgtgttgccggcatatacgattggtggttgcgaattgagcgtttgccgctgatgaatatgaccaagtgcccaataatcataatgtttcgttaataattcactaacgttgaacggggcgtagtggtcacccgccacaccaatctgaccgtgcaaggtaccaatctgataatcaacgcccgtggctttaacaggataatcatcaactgggtccgtcgtcacccaccgctgcgcatagctaaacccactaatcgcgacccgttcttgtgccacagtcgttaaggtagccgttgttacctgcgggccaaacacgtgcacattggccggaaagtgccagcgacttaaatccgcttgaaaatcatggttaccgaacgatagcagcaccggaatcgaagccgtattcaaccgcgctagcgccgtcatcagtgccgcctgggcctgaacactttggccctgttggtcaaacaagtcaccaacgagcaggacgaaatcgacttgctcagccaccgccaaatcgactagtcggctgagtgccctcagtggtgccgtcactaaccgttcctgcaaagctggtgttaagccactcagtccttgaaacggtgtatctaaatgtaaatctgccgcgtgtagaaatttcatgataacccccactaaaaaaggggcaatcacggaacagattccgtcattgcccctcgatccttaatttacttagttctggtataattcttgaactggtttagtgataatttgatttaaatcattcatcaattggttcaagttacgttctttacccattaaggacttaatttcgtcaacgttgccaaccttatcagctaaatcatgggccttttgaacttcgtcatccgtcaattcttccccattcatctgcttttgtgacaattgcatctgaacttcttgaaagtccttaaacagtgaaaaggcactgtcattggtcttcatcgtgtcataagcgacctttaattccttgaattctttagtctgacgtaattcttgttccaattggttcgcagtatcgtaaatatttacggccatcgtgagttcctcctcgaagtatgtgtcgtcattattttagcatttttaacggaacttgaatagcattagtacgttcagaagctagctttactagttgccaaggaaacttttggctttggagaaccagtctttagccttgttcttaactgcattagcgcccttctcaacgttttcccatacggatgatccactatcagaactatccgaatcactactattagattcggttgccagcgtcgcagcatccttcgtaccaaaactagtattattcgtattcggcaaaatattttgtaattcattcttgaataacgaggaaagttgattttcagataaactcttcaaataatgagtactgttcgtcgtatcaaatccgatccaggtcgtgaccacaatgtccggggtataagcaatcatccactgatccttcgttcccgaacccgtactgtaatcagcctgcgtactcccagtcttaccagcaaccgagtatccatacggcttggccgcagccccggtcccactattgtacgtgccaagcatcatactggtcatttctttagcaacgctggcggacataattttcttcgtcttagtcttcgtattatcgacaacgacattgccactagcatcgacaattttcgtaataaagtgggccgtcgttttcttaccaccattcgcaaacgctgtataggcactggtcatttgagcgggtgatacccccgtcgtcaaaccacctaaggcaagtgccaggttatcatccgacttggtaacgggtaagccaaactttttcaccgattgataccctttattcacaccaatcttattcaataaccaaaccgccggaatattcatactttgcgataacgcggtatacattgggaccgatttactataaacattatcatagtttttgggcgcatatttattggccccaaaagtttgcttcttattagaaaggttcgaatcatacgtataaccattttgtagtgctggtgtatacactgccaacggtttgatcgtcgaacccggctgccgcttaatctgagtcgcacggttaaagccccggaagacgtgtttgccccgaccaccgactacggctaacacaccacccgtcgacggatcaaccgcaattgaggccccttggaccttcgtaccatcgtccgcgttggccgggaacaacgtactatccttaaaagaatcttgcatctgtgtctgatcatcttgatcaagcgacgtataaatcttatagccccgattcataatgtcagattccgttagcccgtacttattaattgcttcatcaatcaccgcatcgaaataatatggataattataaccactttcataatggtagttattcgtcagcgtcatcgccttttgcgaataaagcttatactcacttttggaaagcttattattagcgaccatgttattcaagacgacgtttcgacgagccgtagacgctttcggatgattgattggatcataaccactgggcgagctcagcattccggccaaggtcgccgcctggtcaacagacaactctgacgcgtgtacgccaaaatatcgttcagacgcatcctcagctccccagacaccgtggccgaaataagcgttattcaaatacatcgctaaaatttggcccttagaatagacattttcagtttcaatcgccaaaaagatttcccgaaacttacgtgagaaggtctgttgttgtgttaggtaggcgtttttgaccaattgttgcgtcaacgtactcccaccaccactaatgtagtcacggccaagtatcttattgataacgagcaggacaaatgcccgcccgattcctttgactgagaaaccatgttctttatagaaattacggtcttcagtcgaaattaccgcgttctgtaagttttttgaaatactactcaaatggacataggttcccttttgtgaatagagtgaaccggcctttttattgtccttatcatagatttcagttgtcttttctaactccgcctgtaaattaccaactttagccgtcttggcttcataagttaaataggcactcccaattaagatgacggtcaagacgagtacaattagccaccgtgtgatttgtcgccggtgccattggtagccgacgacggcagcgaatcgctgccaatagggtgctaaccaattgccaatgactcgtaagccgtctttgatcgtggcccaaaaaccatttttttgcataatcttccccttgttcagccgacgcacctgtcacaacgtccgcgttacttgttagcttttacaattgtatcataaattttccgatgctcagtaattgaccacaaccttgaaaaaatcttcaacaatcaaacgcaactcattttgtagataacccgatgtttgccagttgttgccgaaatcactgatttagaccacgtgttgtaaccagattaaaggtcactacgataaaacggccataaacaaaaaaagcttccgagccgtccatatgacatacttgaaagctagctcagccattacttgcgccggacaccccggcggttagcgttgagctcattttgttgttgtttaaatttatcgaaggtcgcatcgcgttgtttttgattctttcgaggcgcccgtttcttcgtatatttcatatctcacacctcttttaatgacaataatcataccgtgaacgacggcctagtgcaaccaattagactgctcaccacagtcagtcttcattactaatgtgactagcaaaggattcgtatagctgctttgccaccgtcgtattcggactcacgacaaagatcgtgtcgtgaccagccaaggtcccactcacttctggcaagttcaaatcatcaatgatcgccgccaatagattcccattactcggtaacgtatgaataatattcatgaattcaacacggtcaatgctcgtcaccacatcgtgtagcgtttcaaatagccggtcctgttcatttttgttagttgttttaaaaatcgcgtaccgcgtctgaccgtgctcatccggcgtcttaacgatctgcatctctcggatatcgcgcgaaatcgtcgcttgcgtcgcagcaatgccctctgctttaagcttagccatcaattcttcctgggtagcgatcggatattcactaattaattgttcgataactgcttggcgctctgactttttcatgtcgcgaaacctccccaaatcttgtaatgaatacattatagcaaatattcacttggcaaactacgcacagaacttcaaaaagcacattttccgccactattaggaaaatgtgcttaaacaaatttgtataattatttaaaagtaatgagtcaaccacggttaccagtccactagtaactaatcaaagcggcgtaaatattgccctaataaatccagaccccgttgtaacgtcggcgtatccgtacagtaacctaagcgggcgtgccccggaatatcgaaacgtgaaccaggcactaataaaacaccggtatcccgcagtaattgttgacagaacgtctcatcatcgatcggtactattagtttaatacacgacactgaaatgccatgtggcgtaatcaattcgacccgcggttcctgtgcgacccactctgtcagaattttgaggttgcgactgactagctcccgatttcgcgccagaacgcgttggcggtgcgctaaaattctaacggccagttggtcattcaaaacgcccccgcagatcatcgtataatcacgatacttccgaaaaatatcagcaatggcttgactaggtgtcgccgtccacccgatccggataccaggcgctgaataggtcttggataaactgttgaccgcaattccacgctcgtataaatcggcaattgagacgaacggggtttcatccagtggctcgtagacctcatcggccaaaacgtacgctccaactgagcgagctaatgtgacgacctgttctaacagtgttcgatctagtaaactcccagtcggattgatggcattattgagtaaaatcatctttgtttccggccggatcaagcgttgcagttccataatatccggcaaccagcccgctgactcatgaatatgccaataatcaaccgtagcgcccaatgacttgggaatatcatacagctgctgataactcgggtacagtgcaatcacgtgatcgccgggttccaccaaactatagattgctaaatgattagccccggtcgccccatttgtttggagaacattggctgctggcacttgctcgtataactgactaacgagttctttaaatcgtggtgagccctcgatccagccataatccatccgggccgcccctagttcttcgtaaaaatcctgtggtgcttgttggtcgtctaaagccgcaatttctgccatcgttaaggctgcgattgagctttgactaatatcagtggttgcttcacgctcatgtgcgtttaaccaggcctccactccgaaaccagcaatcttcatgcgtatcgtccctctcataaaaagtccaatacgactagcataccgattgtcagaggtaaccgcaactatattttcgtgatgaaggttgctagcaacttcacgccgtatagaataatgatgccaccacagattcgattgatccagagtaggactcgtggttgcatgagatgtttaaacttactgatcaagctggtcagaccgatgaaccaaataatggatgctaggatgacccccaacataaagaaatgggtcagtgccgccgggattgacacccgaaacgccgccaacaacacggaaccatcaatcagtgcttgcggattcagccatgctaccgaaaaagcggtcagaatcgctgctttatatgaaaagtccgcgtcgagggtccccattgccgtggccttttgccgcaacagattccagccaatgtaaaagaccaataaactcccaatcaacaacacccctaattcgagccagggagtggtctgcaacaatcggcccaccccataaaagcaagccagggagagcgacgtatcgaacgcaattacaattaaagccacccgcaatgcccgttgcaatggttgttcaatagctgtcgaaaccacaaataagttttgcatcccgattggtgcaatgtaaacaattccaaataataatccttgtaaaaacacttgcatgttttgacctccttaagaccagccaattcgattcttttaccaaccaattatcgttcaatcaattggtcatatccgactagcttttaattcagagatgattataatagagataatttcatttgtagccaaccaatttaacaattttcacccaaccacctgaatcaatcatcaaatttctggctagtagaatgacagcttaattcgcccgcatgggcactcaggaggcgtttgccatggcaattttaacgatcaactggcaaccaaataaacaggtcagcacaccaatttaccaacaaattactaactattttcaagaacaaatcgcgaaaggcaattgggccgttggggctaagcttcctgcgcagcgtaaactggccgaacaattcggcgtgaatcgtagcaccctaattacggcacttgatgaactaatggcagtcggcttaattacgagcaatccaggctctgggatggttatttcaggtaaccattggtccagcttattggcggaacacgtcaactggtcgcaatatgttaaagcaggccaattcaagcccaattcccacgcgctccaaaaaatcaaccaatttgaaaccgatgcggttattcgtttaagtacgggtgaacccgcaccagaacaatttccccgtccactttttcaacgggcctttgcacatctaggcgaacagttaacgagtttgaactataccgagcctgcgggcattttggctttgcgacaacaaattgcacgtcacttggaaaaagttgggattcatacccatccggaaaacattctgattacttccggatcattacaagcgctccaactggtctcaatgtcactatttcccaaagatgccaccatctacacggaagcacctacttatgtcaaatctttacacgtctttcaatcggcccacacccatctcgctggcatcccgatggacagtcagggcttggcgtactggcagatgaacgcccccattcagggacaccatgccattctttacacgattccgacattcaataacccgactggaatcgtcatgagtgccgagcgacgtcaacaggtcttacaaaccgcacaagaacaccgcttaccaatcttagaagacgccgcttatcaagatgtctggttcgatcagcagccgccacagccactgaaggcactcgataagactggcaacgttatttattttggtagcatctcaaagtcccttgcaccgggattacgcatcggctggacggtggccgccaaaccggtcatcgatcgcttgactgacgtgcgcatgcaaaccgattacggcgctagctcactgtcacaacttgtactggcagaaatcttagctgatcctgaatatgaaacgtatcaagctgatttccggtccgtacttgtcaagaaggccgcggcggcagaacaaattctgcatcattactgggacgattttgcgacttggcagacgcccacgggtggcttttatctgtgggtccgcttagccgacaacattaatattcccaaattattcgaccttgccactgcgcacaacgttctcttcaaccctggtagtatctacgatttccagccgaatcagtacattcgtctgagcttttcttatgaatccagcgatcgctttgaacaggggattaaaattttaactgatttaattcacgccaattttaacgtttaatcaagtaaagatttcgttaatacacctgattaaccatcatcgatgataaaactatgctagaatgaagactgaataattcacaataatgataaggggcgtattttgatcatggatgatgttaaagcaacggtactatcgatcttgcaagatttaactggggaagatgtttcaaacaatatggatgccaatttatttgatgaaggtatcttagattccatgggttccgtacaactgttactagaacttcaaaatcagcttggtattgaagtgcccgtttccgaatttgaacgttctgaatgggaaacgcctgctaaaatcgtagctaaggtcgctagtttacaataaataaaaattcaaatcgccgttaagcacgctgcttaatggcgattttttaattagctggaaaaattgtctaattaacagctgatttactgcaaataactttaatttgccgatttccgacattacccgtggcaccagcaataatggctatcacaactcattttggaaaattttacgaaaatgatatgcaaagtttacacaattttgataaacaaacgttcgctaactgagtaaactaaaatcactaaaatcatttttgtaagggatggtattttgaaaatcagtgttcatcagctcatctgggtcacgattggcgcaattagcttaactatttttaccggattcggacacctatttgcccggcaccaccaggctattgccagtaatcggccaatcactaaagttagtcattcagcaactaaggtaaccacgccagtcccggagaccgttgactggcacaagccctccctgtcacggccgtatcccaaactggctaaatacgatgacatcaacattcaggtttcaatcaaaaaacagcgagtctacttaaaaaaccacgatcagaccctttataccatgcttgcttctacgggcaaacatggctctgatacccccaaaggacactttgaaatccaagccgaacgaggacaacacttttttaacacgcaatcgggtgaaggcgccaattactgggtctcattcaaggatcatgggatttacctatttcactcagtcccagtcgatgctaacgatcaatacatcgttaaagaagcccagcaacttggtaaagtcgccaattcacatggttgtattcgtctgacgattgctgatgccaaatggctctatgaaaacatttcaacccatacaccggtggttgtcagttaatgaaaaaagaatttaggccacatcctaacgaccgccataatctactctgctatctcagcagcatgttaattaccttttttggcttctatggctttacttacctagtcacctggttaacgattgaaaagaccggtgatccccagttactcggcaacgtcatggcgatgacaatgctgccggcaatcggtctgaacctagtagctggtcgggtacttaaatactactcagccaaacaaatgatgttcattacggatattttgacgggaatactcttcattggtgcctattacgcactaaatacggttagttggcaaatcacttgcttagtcatcgtcgccgttcttaataaatcaattggggtcttttataagctcagtaacaaaacgattttgccagatcttcttgcgcccgtaaatattcaaatcgtcaacggctatcaaactcagattcgccagttggccatcgttagcgcgacaatgctcgtcacgatggcattactatgggtaacaccggctaccctaatcttaacaatggggatagcgttcttggtttcagccggcttcgattggcaattccgaacacgttccaatctctcctcggattcggttgtcaccgtcaagctagaccgccatcgatcatggccgacatggtcgttactgtacgccgttctcggttatctggtcgacgcgacgattgcagtagccgttccttggctcgtcgtcagcaagttgcatagtcactggccacttagctggttcttaacagctaacgccacaggtatcttattggcaccactattgctaaaacgatggtcaaagcaatccctgctaactttgacggccttcaccggtgggtgcttactacttatgtggccgacctttgccagtcttatgattaccatgttcttaattggtgcattacgcggacagaccaacattagttttttcaccactatccaacaaatccccacaaacaatcgtaatactctaatgacgggggtcttaaccgtcatcgacaccactaccgttattggtagtttgctagcaccccgtttgatcttaatgctcggttcttggaccctccccttgcttggtggtggtatcctcttgttttgtttgacgcggctaattatcttattgaacaaccaaaagcagtcttcatccgatatcgacgaaaactgctgagcaacagtcatttaatttgaggccgagggacctagatcttgaccattggatgcaatcactcgctgataccagtagaaagagtccttcgggattcgggccagagttccactaccatcgtcttgacgatccacataaatcaatccgtatcgtttagacatttgccctgtacctgcagaaactaaatcaatacagccccaactggtataaccaatcagtttgacgccatggtgaattgccgttgccattgcttgaatatgtttacgtagatagctaatccggtatacatcatggatttgaccatctactgtcaaataatccttggcacccaatccattttcaacaaccattagtggtaaatgatatcgatcattcatcagctccaaataatattgtagaccagccgggtcatccgcccactcccattcagagtattgtagatatgggttacgcgcgcccatcgaaaaattaccgccaacagttgcactgacctcatgtgttgtaactgccgttgacatgtaatacgagaaggtataccagtcaaccgtaccggctttcaaggcttctaaatcactgtccgtaatgtctaaatcaacttgatgctcattccataaacgtcgtgcataggttggatactgtccctggcactgcacatcaccacagtaatagatgttttgttcccagacgtaccgattctgcaagacatccgccggatcacaggttaacggataagacgtgataccgcaaatcatgcaaccaactttattttcgccatcaatcgcatgtgcttgctgtacggctaaagcactagcgacaaattgataatgtaattgttgataagcgcgttggtaatctgcatcaccggctttggcacgcaatgccagaaacatgatcgtattattaatttcattgaaggtaatccagtgctttaccagcccacgatacgccgtaaatagcgtttccgcataatgctggtaaaaaccaatcatccgacggtcattccagccaccatacgtttcctccagatacagtggcatatcgaagtgtgaaatcgtcaccaatggttcaatttcatattttttcaaagtttcgaacacctggcgataaaaatccaaccctgcttgattaggttcattttcatcgccgcgtgggaaaatccgtgaccaggaaatcgacattcgatacattttgaaacccatctctgcaaacagcgcaatatcttcttgatatcgatgatagaagtcaatactagtctgattaggataatagtcatctggcagtaccgctccgtgtgctccagcaggaattgaatccccttttccaggagtaccatccgcttgcaaataagtgacttgccgtcgctgattaaggcctcccattgtcgtaatatccttcatagtcaggccccgaccatcaacatcataagcaccttcgcattgattagcggcagtagccccaccccagtaaaaatcagccggaaattgcatattcacacctctttctcaggcttcacaggttgcatgggcgcattaccttgattcgaaactgccgcccgcttttcttcagcttcaactgccgcctctttggcaatcagttgcttttcataaactttaaagaagggataccagataagcgctgacggaatcagcatcaaatagtcagtcaatgcgttgcgccaactgagcgtactgagataacttccaaaacccatgggtaaaatcgcggtaattacaatccaccccggtgttaaaaatccaatcttgtatagtacgagtgcacacaacataactaccggaatattcaggacaaacgggatactcataatcggattatacataattggaataccaaaagtcatgggttcattaattttgaaccagccggggataattgacagcttaccaacggcactcagctgtttagatttagaacgcatcgccattagcgctaacggcagggtattcccagttccacctgctacggtcataaatgagaacaacatcacaggtgcaaacaccaccggcttcccagctgcctgcaatgcggcattttcagaaaccgcttgaatcactaacggcatcacaattgggactaaaatcatcgtaccatgaatgccaaaggtccataataaagcacccaagatacacaggacaaaaatacctatggttgaagtcagtgcactcagtggaattgccagtaattccataaaacccgaacaaatattatacttaccggctgttccaaccgtgactaataacgatgcgcccaagaaaatcacggcgttaaacaataatggcacaatggatgcaaaaccgtcttggagaaattgggggactgcatctggcatgttgattcgaatattcttgtctgtacataatttctcaacgcggacggaaatccaaactacgacgaagccaataaacattccctgagcacctaaataggttgtatcaatgctaactgttccagtcttactgacaatcaacccaccggccacaatccaaaaaccaaataatgcgtcaatcgcattcatgattggggccgtcatttttaaattcttggcgtaatggaatcccaagaataaaacaacccaaattgataaagaattcattgagaattggaatggaatcttcaagtaggctaacagaatactctttgctgataacacgccaaacatcgtcggtccaagtactgacatcgtgatttgaaagatcgcgccaaccattagaatacccatcaaagacatcatagctgcctgtaatgcggtaataaacttattattgccaagtccctggccggcgcgttgtaagccgaccatcagtttactattaaaaaagcgttccatcgtccttcacccccgaatactaatccctcgtcatcacaccaagttctcggccagtttgaaaatatgggcactgtcacccaccgcatagtccaatggtggaatagcagcgacgggcaacccagttgccgcctcaacttcaccctgccgataagccacttgcggccccattaaaataacgtcatagtcctgatagacatcttcatacgcggacaagcctactgcctggatttgccctgcaacaccttgttcgtcacgatattgctgtaactttttcattaaaatgctggttgacataccgcccgcacaaactaataacacgttgattgccttcataaatcgaccatcctttcaaatttttgagacatctttaacatctcagcgattaactcgttagctaacagactcgtcataaaatgatcttgagcatgaattagtaaaatatcaatggaaacctgttgaccattcgcctcagccaccagtagttgggtttgaacatcatgtgctttccccagtgcttcactagattgcttcaataacatcttagattcggagaaagcatcgcgatgcatcgcatctaacgcattaaaagccagcgtacgaccttcaccagaatacgcgataagtgtcattgcaatatcttgagtttcagtattattggctaatgtcattatccggttacctactttctgtatttgtcgacaaacatatcgtaacaagttttgtcattaaccacaaaagcgcttacatatgcttgtgtatagatttaaggtccatgaattagcagtatcaacacacacgtggcgtcataatagctgaattagactaaatatccaacttcatcactattagtgtataggtttaatgaccaatttatgtattgtgtatagctgattcatcgggttgtatagcttactcattttaacgcgtttttttcagccttgaactgtcgaaaatgtctcgctataatcgaatcatgaaaatcattcgcacacttgccgtcacaaacacggaattttatgactggttagaaaaacaactactcatagagattcaagccgctactggtgaaatactcacagcaacgtcaatcaagaaaggactgacatatacaaaaacgaccgccaaaacggccgctcagattaaaattacgattgacgattatcagcgtgggattaagtaccaaatgacagctatttcaccactggataccgtaaccgtgacctattcgaccattgctgaaggcaccaaaacaaccgtgacctttctagaagatgttgacagttatcggccacaacaacaccattggctactcagaaattttagtcaagcactgctactcggacggatgtctgacaagttattgcaactcgaacaacaaatcattgctcaccgaacaacaacttgcaaaccgagccaaccatagatactttgtcaacggttaggcctttaaattcatacgaatcgctgaccatctaaatagtcgcttcaagcaatcgccactgcttgaagcgacttatttaagtctcatttaaaaactgctccgtcaatgctagaaccaaccatcatctccccatcaaaatcaaagctgacaccttcctgatatcaatctcaaacgattatccgtggcacttaagattagtgtaattgctttaagatgaccagtagcgtcccaatcatctcatcattcacaatcagtttaaatgtctgctcgaccggccgtagacaccgtcgtaattgctgataatcttgcgaatactgggtcactaatttccgcgtttgcgccgttgtcgtcacaatcttgccagccaaaatacggtcaatcatgctacccaagtgaacaaacaggccaatttgttgatcctcagttagttggtataaggttgtcaaatcatccatgagtggtggtaacacacgctgcaacttagcaacttctgcgtattcgaactgcgtcttaaaatactgatagatctgattataagtatcccagcgaccagcttccggccgaaacatcagcacttgatctaactgctgatgtgaatgttcaaaaattgctgccatcgaaataaacggaatgccgaataattgaggatcaaaggtgccgacaaatgcatgaatctgataaacctgttgtagtctaagtacggttgccaccaactcatcacgatgcccaattgccaacgctttgacgcgcatctgtaaccgtgaatattggtcaatataatcttttaattgcgcagcacccccctcacccgtatgacacagcgtaataatcaattcatcttttgttgtcttttcggcgttcagttggtttagatcgacttgcactagatgataaacatcgtccacgtccattacgcgcgcactctttcgagcagcatcgactccgactaaagtcactgggacttgaatcatccgaattttggtcgcgagttcgccttgaatggtcgtcaacatccatttgattgcccccatatcataaatgactagcacacctgcaccgcaatcaatctcgctgattttatgcttcagtgccttcatcaccatcgtgctatcggctgataagtcaacatcataagcataagtattgctgacagcgctgagcgtgttcgttgttcgcatcagggcctgggcagtccccattccttgcatgacgtaaagcacaaccgggtgatgacgcgtcactggtgattgtgcaactaaaaacgttgctaataaagcaacttcagccggtgaaatggtcaaatctagttttgtcgctaagacctgtgctaatttaacagcagcctcatattcggccacatgttgtgactgtaattgcgtgatcattgtcgctgatgcaggtttggtcgttggcatttggcgatacatcccattaatgtgtaaacataatccattaaacacactctcggtcaacggccgtgccaataaccgttcacaatctggttgccagtctttgacaatcttaataattagtggcgcaacgatttgtgctaaattttgcgtattggacgcacgctgttggacgatactcggttttatcactgacggtgattgttcaactgaccttggcacttggacactgcgaggacttgttcccggctcaacttgttgccgactcgcttgcaatgaatctgagctcaaacccgaagacgacttggccgcaaacgataaatcagctgctgccaacacggccgccaattcttgttgatagtcccgttcgtgcgctaacgcttgttgaacggcgggcgatagatccgcaaggtacacgcgaacttcacggtcagcatcagccataaatcggacataagcctgcgcacaggccatcgtgatggtcgctttcatcgttttcaaattctgatcataatttgccagcatgagcgcctgggcaacggctagttccaatcgaatcgtccgcttggattgttgagcttcaatcgtcaaaaaacgacgaatcaacgcccatctttctgaccacggtcgttgcttaaaatcaggtaattcaattttcattatcaattgctgcgtcctaagaatttcctgatcaatcccgctcactaaaatgattaacggtggttgcttatgggacgccacggcttccatgacactcgtcaattgtgcgcgttgcgggccatctaaatagtcgtaatggtcaatcacaacaataccgccctcggagtgtgcccaaagactgtgcgctagctggccatgctcaccaaataattgactatcaagttggtgaatatcgtctgcataatcacgacacttaacaatgatggggctgctagctgccgttaatataccccgttgctcaacaaaattctgaatttcgtgtacaaacgtggtactgcccgccccaccgtttgccacaatgtgaatattcaaaggaccactcggatacaaaacagccgcttttgctagtttgatcgcatgttgcaagctatttaaacgaccaattagtcccgtaaatggctcttggaggtgggacgcagctaataaaaattgaactggccgcgtcttagtcttgaccaatttttgtttgcgcactaaggcattcaaagccgcgctaacatttgtgcgttgcattttcaattgtgtagcaatgaccattgctgtcacaccatcgtgataccgcgtatccgttaaaaccaatttgcgtaccgtatcataaataagctctcgtgtcgtttccattagatttcacccacaaaattcgcatcactacatttataccagatttgtacatatttcgctgtgattggcatccgcaaaaaagcacccgttgctcatcacagcgcgtgtcgttttgatcaataattagccataattacgccacaagtttggttaaaatttgcgtggcatccgccaaaactttttctgggtgctggcgggcgtcggtcaacatacccaatggctctaaattcattgcagcaaattctgcgtgccgagtttgaaattgacgatggaatgggagtaagtcactggccgtcatcgctgacctaacagctactggtgctggataacgattcaaaacggtgtagattttaggattggtcagtgtgtattccatgctaaactgtaaggcccctaaatcttgatacaacaacgtgttgacatccgtttcagtcgaataggttaaaataatttgttgcgctaatggcaaccagcactcgttgagtaaccaagtatagttatcgtgtttcggacccgtagaatcaagatctatcaataaataatccgtctggacaccctgcaacgctatccaaaagttgttgagctcgttagccgttcgaatatctgactgccactcatggcagtgatgcttttgaatggtccgccacgtaacggtttgataattgcaactaacgatggtgaccgtcattttccaattagtcaatacgttcgctaacgccagtgtcaacaagctcttgccactagcaacctgcgttccaccaatgactagtgtctgtggttgtttcctcaaaacaaaaccctccttagcttaatttacaccaacagcatacccggacagtcgctgaattactagtgttttgcatgtataacaggggggactttgggctttttatgagaagtcactgataagtttgttggcgaattaattcactcgttgaataagtcaagtgggcgatggattaattctgcatagggttgacaagacacggttttggccacaaaaagtaagcgccaacatgtatggtaatcaatttaaacggatacaattgaattttgccattgctacttatcttctcaaaaattagtttttactaataatgtttagttatgtcaattaactaactagcaccggtttgtaaagaaccatcatcgacgtctcaagtacacgctaactgccaaataaccatccccagttacctaagaccagaagatattaatcaaaattagctcgactagtaacgcagaacctagccgagctaatttacttttctcaatcagaagtttctgcgtaccctgggcgagccaatattagaactggctgctgtcgttaataccagccctaatgaattaatgacccccacccctgaataaaacgactattttgcgacatctcgcacagtttttaaccactccttcaaacaagttgactggttaacataacttttccatcacgacaattatccaatcacttgttattcagcggccaaggctttgatcggattagcccgcgcagcccgccttgctggtaaaatagccgcaagccaggcgataataattgcgattacaaaaattgcaattacgttgccgagctgaatctgaactagcgcatacccgccagttagcttagccagaccatgattgagccctcgttcagctaaataggacagcccagtcgctaacgtggcactgataatgcctaacatcagcgcttcactagtaaatagccggcgaatatcacgccggcgctcccccagcgaccgcagaataccaatttctcgcatccgagcactgaccgacatgaacatcgttacaataatcattaatgcggaaacgattaatgaaatccccgcaatcgccgccaacactttagtggcaatattaacgtaagtattgaacgaatccaaagtggccgcaatactagtcgcggcaaatgggtgcttgccattaattgataagtggttaatttcatttaccacgacctgattttgcacccgactcttaattctaacgctcacaaacgttggttgtgttgagacacgtgccgctgaacgcatcgactgcatcgtggtgtagttaactgcattcaaaccgacctcagaggtactatctactattccggcaaccgtcaacacgcgcgccacggtcacgggttgccctttttgattgaaggtttgataactcacagtcacagcccgacccactaactgacgccaacgcgttgccgaccatttctgcgcgattgaagacttatctaatacgatttgattgtcacccgccacgtggcctgctttcaactgccgggtcggatcactactcgtccaggtcgtcagttcaggtgcggcatacttttgttgtccaatcgcaatcgttgcgtttgtagctgaaatcccgggttccacgttggtcacgtgcttaaggtcacgcaacgctgtgagttgtgagtcggtgaacaccggcatccgggctgcgataccgccggctacagctggatcatagacggccgcagcctgttcatcacgatccttcgcgttatccgcttggtgcatgaccataattgattgtgggtccaccaacgcattcatttcgtggttaatatacccttttatgccggtccccagaccattgaaaagcatgacggcgaataatccaatcgctgtgccaacgacaattagcgtattccagatccacgtatgccgcatatgcttgaaggccatcatgactgatacccaatacgaaagtggccgcgcaggtagtgacgcaactgtttgcgtggtgccgacattttgggtggtcactggttgtgacttaattcgtccattcaccaactcggcaatccgggtcgccgcacccgccacgcgctgtgaatgggtcacacaaatcaccaagcgcccttcccgtgcgattttttgaagcatggccatgacatcggcggtattgtctgcatccagcgcaccagtcggctcatccgcaatcaaaattttaggatcaccggctaatgctcgagcgattgccacccgttgtttttgaccacctgataattgttgcgggtatttttttatttgtgccgtcaagccaacgtttgctaggagctcgtgtgcccgtcgcaatcggtcaccatggcttaatttagtcatatctaaggctagcatgacattctcaagcacggtcaaatgaccgattagattgtaggtctgtgagatatagccaatgacttcgcgccggtaccgatccagctggcgctcataatgataatcaagtggttgtccagcgatactgacggttcccgtgaaatcatggtctagtcccccaataatattcatcaaggttgtcttaccaccacctgattcaccgacaatcgccacaaactcaccgagttcaaactgcaagttaatgtccttcaagacgttgaatgtttgtttgccaacctgatagttcttacaaatattcgttagttctaagtagctcatcaccaagcccccaatatggcattttgaattagttttcagaataccaccccggacgactaaacaggtcattaaaattttagtattggaagttgccttattaagattttaatgtttgtttcgatcatcacaccgacttataatcagacataaatcatgcttggtttcactaactcggatgggcggtcatttgtaagcatcatgacgcccgcaacccagtttgagcatttatctgaagaaaacacagccaagcctcaaacggagggataaccatgaaaaaggctttcagcttaatcggttccgactatattcgttgcgcgatttttttcgtgattgctttttatgccgtcaccgcagatcccagcggccgttttcacctacattggacgttaaccaacctctatctgacttctgcatacttcttcggccatccactcctaatgtgcctattgccacgacttacccataacccttttcaaatgatttcagtcgcttcacgtgccttgaatgatgcgaccggtcaacatcaaacaatcactcaaatttatcataacgccgtcaatcccgtcagtagccgtgatatgttgctctctcagaatgaatatcgtgacgatatgatgtcgatcagcgtttcctttgtcattcatgggtgcctattgttactatcttggccgttaatcgggcttattttactcggccggggcggtaaagccttgatccgtcgactgataatccacttcacacgataagtctggttccagttacaatagtgggcctccgctacctacttgcgatttctgcgattggttcacaacttgcgttcgccatcggttgtatatcgagttccgtgcctctacggccgcaacaaaaaaacgccacgcattctcgcccggctttaacggccggtttagtatgcgtggcgttcaaatttgaacagttgttaattaattctaattacatttcatcgggagccttaacgccaagtaagcgaagggcttccttcaggacgatgctgacactcttgaccaaagccagacgagcgtttaattcatcatcttcaactaagattttggtgttagcataatacttgttgtatgccttggctaagtggatcgcatacttagcaataacggatggttcgtattccgtgctggcacgtactacagtcgctgggaattcactcaataacttcaaggtatcccaagcggctgggtcgcttaacgtttgctcggttgccgcaatttctgggctaccagctttacgtaagatactttcagcgcgtgcatgggcgtactgcacgtatggcccagtctcaccctcgaaacgaacaacttcttccaagttaaagtcaaagctgttcatccgttcgttcttcaaatcatggaagaccacagcgccaatcccaaccgcatccgcaacttcatccttgttaggcaagtccggattcttggcttcgatttgttcatgagctaacgcaaccgcatcgtccaagaccttatcaagcaggatgacccggccactccgagttgacaacttcttaccaccagaagtaatcaaaccaaatggaatgtggtggatctggtcagcccagtcaaagcccatctcggtcaacacagcctttaattgcttaaagtggttggtctgttcattcccaacgacgtagagggactgcacgaaatcataagtccgtttccggtagatcgcagcggccaagtcccgcgtgatgtacaaggtcgcgccatctgattttttaatcaatgccggattcaagtcatatttgcttaagtccaccacttcggcgccttgactttcttgcaagaggtgcttgtcttccaagatgtcgacaacttcttgcatcttatcattgtagaaggcctcacccttgaaggaatcaaagtcgatatccaagcgttggtaaatcttcttgaacgctttcaatgattctgagcggaaccatgaccacagatgggtggcttcttcatcaccattttccaattttttgaaccattcacgcgcctcgtcatccatttcaggatgatcgacgtcttctttatggaaacgtacatagtattttaataagttattgattggatcagccttgacctcagcttcgcttccccacattttgtaggccgtgatcaacttaccgaactgcgtgccccagtcacctaagtggttgatcttaacgggttggtaatccaacttacttaaaatatttgccaaagaattcccaatcactgttgaccgcaaatgccccattgagattggtttggcaatgtttggcgatgacatatcgatgggaacttgacccgcttcaccgagcttagcatcaccaaaatggccaccattcgacaacacttgatttaaaatatcggctgcaaacgcatctttcttgaagaagaagttaacgtacgggcccattgcaacaactttttcaaagtcactgccatcgactttttcgacgatgtcgatggcaatcatttgaggtgccttgtgtaacgttttggctaaggtgaaggtcggaaaggccaagtccccctgcttagacgtctttggttgttcgatcttatctagaatcacttcctgcgttaaatctggtagtgctggcgctaaggccgctgcgacgagttgtttataatccatattgtcctccttgattgtcttacgggacaaaaaaagtccctcacatatttaaaaacatgtaagagacgagacgtgcccgcggtaccactctaattgatatgacatccacttattatcgaattgtcgtcttcaaaagcgcgcttccaataatgtttagattcggctcccatcatcccgaactcgctggtctaaacgttcatcgtactattctttctcattagacgtatatatttttaccatgcgttagtataacagaattcagccgttttgactagttcaacgttaaaatcatattctgatgcggaatcccatcttctaaataaacgccagagactggttgaaaaccaaatccacggtagaagcgatctaagtaatgctgggcctgaatattgatttgcgtcgtggaaggccacaacgcttgaatctgcacaatcgcctgttggagcaactgctgaccgtagccgtgcccccgcaccgccggattggtgatcacccggccgatacgggcctgctggttggcttcacgcattaatcgcgcatatactagcagctgttccgttgaattcagccctcgtaaatgccaagccatcaagtccgtatcgtcgacttcttgatacggacaggcctgttcgacgacaaaaaccgccactcgtaacttgtaaatctgttgtaactgccgaacagttaactcatcgaaagatgttgttataaattgcatttgcgctccttaacgattactgttgatcacccatccggtcaactatttagtcatcttgatttttactcaataaaaaagaacgggtcattgctgactaacgttcttgattatcatcatctattgacggtccgtacgagactcgaactcgtgatctcctgcgtgacaggcaggcgtcctaaaccaactagaccaacggaccatgcgctcaaggagcttgagaatacaatgactactaaccgaaatgattaatagcaaagcgggtgacgggaatcggacccgcgacgcaagcttgggaagcttgaattttaccactaaactacacccgcatttgacaacagaaattagtatagcatacattttttctgttgtcatggttatttataaatttttagtcttctttttctgggacgactttcggctttggagccgctttaatgagcttagcatcatccttacgaacaactgcgcggtggttatactcgttaacaattggttcgtcagctttttgaaattccttaattaagatcaagactgaattttcatacactttttcaatttcacccttgaaatcatgttccaacgaagcaaacttcttaccagcgacgtaatcgccaatttttaattctacggccatttgtaaactccttaacgtttttcaattcatgccccgtccacaggtgtccgggagattatatgagtgactttaaaataaaattgataacaaatattatcaaataatccacttggttgcaagccttaattacaatttttcagaatcgtttaatattggttcggccccttctgcgaccgtgtttgtcatgcgggcctgttgtcgtaaatcgtggactgatttaatataagcaggcaaaagcacggcacacgaccctaaccaagctaacggttccgaactacaagcaccggcgtaatcgaagatccgaactaagatcagcgctgcaaacacccgcataaagagttccgccgcgcctgccaaagttggaattgcgctgcgtccaagcccttgcaaggtattacgcataataaataacattgataataggatatacgtgctcccgatgacgttaaaatacgtctgggataagttcaataccgccatgtcctgatgaccgacgaagaatcccacaagctgtttaccccaaataatttcaatcaaaccggcagccacactaaagctccccgacagccacatggtctgtttgactcccgtgataatccgttcatactgatgagcaccataattctgagccgcgaaagtcgccatggtgaccccaaaagacattaatggctgagtcgcgacttggtcgattttctgagcggcagtcgtcgccgccactgaattagtgccaagactattcagtgccgcttgtaacacaatcgttccaatcgcaatgatcgacatctgaaaagccatgggtaacccaacattcaggtgagccttcacttccgaccaaactaacttgaagtggcgccgtccaatgtgcaagatgggtactttgacgatgatgtaaaccacacacatgagcgttgcaatggtttgtgctaaaatggttgcccagctcgccccggcaatgccccatttgaaaaccaaaatgaataacaattccaagccaatattaattaacgcgctgataatcaaaaaccataaaggcgttcgactatcaccgagtgcgcgaatgatgtttgacaacaggttgaacgcaattggtgccagcatcccgccaagcataatttgtaagaatgtccgcgcatccgcaatgatatccgttggcgtttgcattaacaacaagatatggtcaacgaagatcaacgacagaatcgtcaaaatgatcccaacaattagactaactacgatactaatcgcaaaactgcgccgcactgctttaaaatcacgtgccccaaaatgttgggctgttaatatggataagccagcggttaacccctgcgcaaagccaatgatcaaaaactgaacactcccagttgatccaaccgccgctagggctttaacccctaacgtctgaccaacgatcaacgtgtccgataaactataaaattgctgaaaaatgttaccgattagtaacggaatcgtaaaccaaaaaattaattttagcggttttccctttgttaaatcgttcattttcgcactcctttcattaattaagatgacgtacttgtaatcgttttcttggcgctttgccagacaagcaaactttgctagtatatcaactttagatttataatactagtcctttgttcgcaaatattaaatattttattttaattagtgaattggccgtcttgatttactttttaaggttatttcactgtgctaagctgtcaccgatttactaaccaacacaaaaaaacttgtcagcaggcgctcacaagtcttttagattcgattaagtcacatcacagcaccatataatagtaataggacacaaacacacaaacgaccatacaaatcaaatttaacggaattccgactttaaagtagtccgtgaacttataatgtccagggccgtaaacaattaagtttgtttggtacccgattggcgttgaaaagtctgccgtcgcagcaatcgtaatcaacatcacaagcatcatcacgggtagattttccaacttcgctgcggaaacgaccactggaaacatcagtgataacgccgccgcattggacaaaatggccgttaagaagttagtcacgaaataaatcaggaacatatagatgattggtgatgcgttcccggtaattgctactaatgactttgcgataaacttatcagcacccacattcgacatcgcaagcccaagtccataactactagccactaaaaacaacacgttcatatcgacagccttcacaatatcgctgattgaaacgcatttcgtcaagaaaagtaccacgcacgaggccgccagaccaacgaataaatcaatcacgcccatagtcgacacgatgatcgttgcaaccaataaaacaatcggtaaaacatccttataagtatgtttccgggacttcactggttgtgaattaaagacgtgtaaatctttgagacttgccagctcgtctggttcaccagtggtaatcatgaccaagttgtccccgccttttaagcgaatacttccgagatgcccttcgaggttgacatcgttgcgtcgaattgcgacgacgacactcccaaagacattgcgaaaacgcgctgatttgaccgtttggttcaccaaactggacgtgtccggaatggagacttcgacgagccgaacccgttcattggtgatatcagtcatattgattttctgagtgcttggtattagacctttaatattcataagatcattaatacaatcaaaatttccagtgaagtaaagacggtcacctaactgtagaatcgtctcatccgtcaccggcacgatcgactgaccactccgattaatcgccactaagaaagagcgcggcaaattacgaagtttggcggcgaccaccgtttgattgaggtgttcaaactcatcgccgatcgtcatttcaatcaagtaatcattcggttcagcaacaacatcgtcaacactactcccataataggtcggtaacatgcggtacccgatcgtcagtaagtaaatcaacccaataatcgtgatgggaatcccgatgacggccaagtcaaaggtaccaaattgtgctaatttgtacttagacaataatccttgtgccactagattggtcgaagtccctagaacggtcaacaacccactcagaatcgtggcgtaggatagtgggatcaagaactttgagattgccatccctttctgcttcgtccaacgctggaccatcggtgtcaaagtggacacaatcggggtattattcataaacggtgaaatcacactcacgctcgctaacaaccgtaataaggaacgcttttcgctgtgaccatcgccgagaatccggtcaaataagtgggtaataatattacttttggcgatggcataggcaataatatacatcagggcaattgtcgctaacccgtcgttagcaaaacctgacagtgcgtccgttggcgacaagatgccgacaaacatcaagaacgctaaggcacacaagattacggcgttcggggtcgtaacttccatggccattaatataaatgatactaataacgtgattaaaacaattgcaatatttaaggtcatcgtcatcgctccgcttcaactaattttcatcttgctgagtcttgcgccactgctcataatcaacctatatccgtcgcgccgttcaacataagaaccattgtagacttggaatgtgaacataaatgcgacatggtatgaaattattctagctttgcggatgattttgcgaccaaattgtgactttttcattaacgttcagtcacaactttgaaaacgaccttttcggactagcaattggtttgtgaacaggcacggttgaggtcagattgaagtcagacggacgctccaaaactggattgtcaaggggaaaaacaatgcctgactgtctctctataatctgttaacggccgtgactgattagcgcaacacgcaaacaggcgcccccgaccagatgagccatctagtcatgagcgcccgttttacattcaattcttattcattaataccatacgtgtgcttcgtcggatacaacgagaagcgttcggcccggtagacataaccaccgcttggaaggcccgttaattcaacgttaaacacctgttgcttgctcttcaaatcgtattcaataatattagctgatttaccattattcaaccaaccaaaatcaattagccgattcgaagcactcaagtaacgattagaaccaataatattggcaaagttcttcttacctaatgacttgccgtaactgccaacttgagaaatcgtcttcgtcttttcattaatatgatattcgacaccttctgaatatttaccagaagagtccgccaacgatttcttggtcgtaccaactgccacgttattgttgaagatcatcacgttgagcgagttcttcttgcccaaggtgcttggatcaacgatggcggcatgttgcccacccggccaagcaatcttaccactagccttcagcaagtacttgcggtacgatttcggccaagctgaagtcttcttaccagacaagatccacttgatcttttcagtcttgtaatcgatcttcatcactaagttctggttgcgacttgaaataatcaagctcttatccgtcttatcataatagacggagttctgatgaaaccagtccttcttacccatatatttactggacttcgtcgcgttgtacttcgtatagaacttcgcaggtaggatattcttcatgttgatgaccttggtgatcttacccgtcttatgcgatataacgatcatcgtgtcttcgacataggtccggccgccatcggaaacggtcgcaatcagatcaccgtttggtaattccgttacgtcatggtggacctgattatggttctgcttcttagaacccttagccttaccccaggccttatgattaaatttataagtcttataaactttacccgtataatccatttcaactaactcatcaaaatatgaattcttagcattcgatttggtccaaatcaataaatgcccattgttaagttgtttgaaaatgtgggaagttggccgcgttgtataccaccgaatattaccatccgcatccatcccgaacgataagtttttagactgcttgctcccagagatcgtcgtccgaaccataaatgtcagcttcgaattaccagtccctaagaccattttttgtttgttagccttcttaacgttgatcttaaaatcggtcaacgccgatggtaacttcgccgttttcagtcggatcgtcttggtcgtcgacgtgccatccttataagtcaccttaatcttgacctggttattcgtgttggcgtataaccccagcacggtcaaatcatgactcgttgtgtacttattgaccgtattagaaattgaagtcttactactcttgccgaccaccgtataactgaccttggccgccttgctcgtctggaaaatcaccttagcggataacggggacaccccgtatgggttaaccttcgtgtacatgttattaacggtataattcttattggcgaccgccttcttcagcgtcgccgtctcactcgactgggccttaatctcagtcttgactagccgcgtgttgatgtccttcttcgttgcactcgccgaacgtaccttactagtggtcgttgtcgtcgcagttgactgatgatatttgtaatacccaaaaccaccgccaatcgcgacaatcacaacgacaattagtgcaatcagccaatttcgctttttcatttacctttcaccgaccctatctcactattttgtctgacgccaattaattcctcacgaccgctactccaacgacatacccgttttgtcagccagaatattaggctcatacgctgatactggcggtctaaccttcccgtggcaacccacgtgaccgacacagaatgactaacaattgccatgtcaaaccgaatcagtgcagtttatattaaatttattatactcaatctacggccgtcgcagctaatatttgcgcctgcatttgctcaatgacttgtccaactgtcgctaggtcaggaacaaatgccccacttgctaacggatgaccgccgccattgaacgcttttgcgaccgcattgacattgattgctttcgaccgaaaatgtacgcggtattgcccctgtggggtttcaatgaagaacaaccaaactttgaccgtcgtcaggttaccgggcaacgggacaagcgcatcctcatcgccacattccagactcaagtcactaaatagccgttgcggtaagacaacgtgtgccagaccacttggctcaatagtttgttcactcaggacgtacccatacaacttgctgagtgctggcgttaagtccatttcgtggtgactaatagtggcaatatcaatgtccgttgccgcgagtgcactagcaatcttcagagttcgagtggacgtctcaggagttgaaaagcgcaccgtatcaccgataattccggcatatagcttggttgcaacggccgccgtcactgtaaagcaccccgcttgcgccaactcataaatcatctccgagcaactgctataagtttcatcgacccagttcagttgcccatagggatcgtgattcgggtgatggtcgattttaatcacaaaggcacctgttggcaactccccagctaggcgctcatggttagcacaatctacggcaatgactaagtccgttgcttggggggtcactaactgctcatcggttgtatcgatccacgccaaatggcccggaactggggccatcgccacaacgagtttctccgggtaagccgctttgagcaaggcgactagtccaaattgtgccccgattgcatcgggatccggattcgtatgacgatagaccaagattcggtccattttcacaatcgattttgtgatggcagtaatgattgcactagttttcatttgcagtagccaaactgacgtaatgatgttccgccaagtaattcaatacttgttggacggaagcggtcagtggttgtttggacgtgtcaatcgtaatctcaggatcgataggtgcttcgtatggtgcatcgatgcctgtaaagcccgtgatttcaccacgacgcgccttcgcgtacaattgtttcacatctcgttgttcgcaaacttcaagcggcgtgtcgacgaacacttcaataaactcatcgacctcaaggttcgcccgcactttatcacggtcagtccgatatggtgaaatgaaagctgtcaacgtaatcacgccagcatcgacaaatagtttggcaacttcgccgattcggcgaatattttcttcacggtcttcagctgagaagcctaaattcttattcaagccaaagcgcatattatcgccgtctaaaacgtaactaccaacttgttggtcaaataatgctttttcaacggcattcgcaatcgtcgacttaccggaaccggacaggccagtaaaccataaaaccacactcttatgatggttcagcgcttgccgttcggccttgctaacttgcgattgatgccaagtaatattatctgattttaccatgcttagacctcctgttgctgttcacgtttacgcttcaacccatcaatgagaacccgggcaacttcgggacgtgaaacttcctttggtggtacaacaccatcagccagcatcttacgcaccttcgtcccgcttaatgagatgtgatcttcggcaccgtgtggacaagtcttctgcgttgccattgaaccacactttttgcagtagaaggaattatcgaatttgaagaagtgcatgcccatctcatcttcgaccgaagtgattaattcttgagcttcataggtcccgtaatagtcacccacaccagcatggtcacgaccgacgataaagtcagtacaaccatagtttttacgaacgattgcgtgtaagatggcttccttaggaccagcataccgcatcgcggctggataaatgaccaaccgaacacggtcttctggatagtaatacttcagaatcgtcttatagctttccatccgaacgtctgctggaatatcatccgccttggtctcaccaaccaatggatttaagaataacccatcgacgttttccaaagctaatttttgaatatattcatgcgcccgatgaattggattccgtgtctggaacccaacgatccgcttccagccgaggtcatggaacatcttccgagtttctaatggttccatataataatcactaaaagcaccatgatctggcttatgcaacaatttaattgcgccacccaagtagacgtcaccattggcatacaagcgtttaacacctggatgggcttcgtcggtggtcttgtagacgttttgggcttccaattgcttgtccggaacaaacttatcttcaacttgcatcgtgccataaatgacgccgtcagcgcccttcaaagcaatcttagtattcaattcaatcttatcagcatccgcttgggacacacccagcgtaattggtacactccagataacgctactcttcaagtgcatcgtgttgaccactgaatggtaatcatcactgaccatgaagccagtcagggggctaaaaccaccaatcccaattaattccaagtctgagatattccaattattgatggttaaacttggcagctgctcagcagcctgacgcgttgcttcactaaaatcttctaaattaactaacttaccaccatgagctttaattccgtacactgtttgcatattgatcacctttcacgtttaaaatttcatcataattaagacttacaaaatggttcaatgcggcttgctgttgttcatcctgactcgcacgtcgacacaacgctgttaaagttgccgccacctcatccatgtctagcggggtccgcagcttgaacgtttcgtccggctgttcatctcgtaatggcgctgccttggtcggctcagcagcaataaaagccgtcaccgcactttgcgacgcaggggttcccagttcgtcagccatcaggaccaagtatggtggctgttcaaccgcgtgcaacgtccgtattaaatgttgaatcgctaatcggcgctcacgttcatcagtgatggccgttaagtcatctgcaatcaccacgttatgcgtatccgcacctaactcggcactgaccgtcgttaacatttcaacgatttcattgtttttagcatccccaatcccccataacgtctcgcgtttcgcgtttttacggagataattgttcagggcttccttttgctcgaccactaaatagtccaagggggtacgtctgaatggcaatcgtattattattcaaccgttcgctcaaatcttcagcaacctcatgactgtcagcttctgtgccgaccatcttgacttgatcatttcgtaaagtcgtgttgacctgatcaacttgggcctgatcttcgccgaatacaaagaacgttttactattgatcttgacgttaaagtcccgatataaagcgccatacttggctaaatactcgtcagtcatctcgtcgatgcgctgttgaaattcagccgaggcaaagtaatccgggtcagccgcagcttgacggcctagtaagtaaagtgccttaacatcggttttcacgtccgttcgagcttcaaaatcagctaaattttcaccgctatcactcttttggagtgctggatcgatgaagtcatcgatttgcgcttggagtgccgcctcgtcgctcgtccacggtaagttaaattgggtcgcgattcgtttcaacgtcgtcaacgtctgaccaaacaaatcttcgtacgtgactaaaatgcggtgctcacggtcggtatcacgtaatgaaagcaacgtccggacttgccactgacgcattgcgagcgtggtatcacggtgccaggcgcgctcattcgaattgaccacgtccatcggattacgtagcaagacgatctcagccggctgaacctcaacgtcagccaaaacacgttgccacaattcgatataatcattcatccgtgggtcttttatcgccagatactgttcattctcaaaaaaatttcgtagatacgtggttaacgccgcccggtcctttttaatcttcgggctatcatagtaacccttgaaggctggccggtaccggatgcgacttccaagtgacttgtgaatattgatgacatctttattttcaaaatagcctttcggattgatccgcttactaggtgccaacaggttatcagtcccgagagaaatgcccatcaaattaacacacttagtcattaccgatgttccggaacggccactcccaagaattaatacggcctgcttcgtttgttgacggtgattaaacaatcgttgccataagctttgactcattcttcatcatcctaatcattattatttatttgatctttggtacttcgctagtgggctcaccaaatatactagcaagttaattgtgaaaataagtactcttaactcgaaaaaaatatgatgatttcatgaaatttagtgcttttagcaagtacgcacccggtaatctgctgggtgtagattaggacatttccccacagttttgatgaaatattcaaattttaggactattaaaatccctttataccagtgcattgattaccaaagcacctgatttcactcaatatcgtcagcacccttaaccaacttaatcctcaattgaatgcttggcgcaacgcccctgttatgaagacctaaaatgtcaacccaaccatgtgggagctgcgtttcaaccctattcaccagttcaagcggtcggaatccgacaacggttgctggcaaatactagtggctgttcacaccacgtttcctacttgcctggctccaaatagcgtgtgcgtcacattacgccttgaatatgttcaaaagattaaaaaataatttgactaaattagaaattggtggtattttctaatcaatcataaaacatgtaaacgtcctgaagaggaaagtaatcatcgctacccgtgcagtgagtttggaatagtgcaaaccaaaccggaagacgattgatgaaaaatggcctccaaacggcaccactgagcttttgccaggtgatgacagttagctactgttaataagcttccgtatgaaacgtacggattgaggtcaatatcgtgaggtgttgacaaattaaggtggtaccgcgaacggcaacttcgtcctttaatcaggatgaggttgccgttttttcgtttaagataatttgctaaatataaggagtgggttttaatgacaattattaatagtaacttggggtatccacgtttaggtgaacatcgtgaatggaagcacttattggaacacttttggaaaggacaattagacaacgtgacctttcacgccactgctaaaaaattacgcctagctaacttgaaaaagcaacgcgacctgggagtggactatattccggtcgctgacaattcggattacgatcacgttttagatacactagtcgcattcaacgcgattccaagtcgctttggtcacttcgatcaccagttggacttgcccgactactatgcaattgcccgtggaactgataccgccgtggcggccgaaatgacaaagtggttcaatatcaactatcactacattgttcctgaattcgatgacgtgtcctttaagttattagataatcgctggctacgctactaccaagaagctaagcaagaactaggcattgatggtaaaccagtcattctgggtcccatctctttccttaaactgggtaaacgtcacggacagtacttggatgacgccgccgtcaacgaactattaccgcagttattaccgctttaccaacaagtgtttgaagaattagcgacagctggcgcaaaatggattcaattggatgaaccgaccctagtcaaaacaacgacggttgcggaactcgcaccttatcaaactgcacttgaacatttgcatgcggctgtcccatccttaaaaatcgaactccaaacttattttgacagccttgatcagtacgaccaaatcgtgacctggccaatccaagcacttggactggacctagtacacgaccatggtgaaaacctggcgcacttggtcgaccacggcttcccaaccgacaaaattctcgcagctggcattattgatggacataacgtctgggctagtgatctacaagcaaaacttgcattagttcagcagttacggcaaatcgtgaccgatgatcagttatggctccaacccgccaactcattattacacgttcccattaccaccaaaaatgaaaccaaggctgaccccgtcttactgggcggcctggcctttgcggaccagaaattggcagaactgcataccttaaccgtggcagccaatcagggggttgccgctgttcaagcagtgttcgaccataatcaggccaacttgactgccctcaaccagtccagtcaccgcaacaaccagtcggttcgcgccgctgaagcgcaactgagtaatcaaaaattcgaacgccaggcaccatttgcgacccggattaagttacaacacgaccggttacacctacccctcctgccaacaacaacgattgggagctttccgcaaagtgcgcaagtccgagcaaaacgagcagcatggcgcaagggtaatttaaccgatgccgattaccaggcattcctgcatgctgaaaccaaacgatggatcaagctacaagaagacctcggcctcgacgtcctggttcacggtgaatttgaacgcactgacatggtcgaatactttggtcaaaaactgactggcttctatgcgacccaaaatggttgggtccaatcatacggttcacgaggcgtccggccacccgttatctttggggatgtcgcttacacggaaccaatcaccgttgctgagtccgtttacgcgcaaagtctaaccgaccagccggttaaaggcatgttgacagcaccactgaccattatcaactggagttttgttcgcgacgatatccctagggcgcaggttcaaaatcagattgctttggccctccggcaagaagttcaaaacttggaaaaagctggtattaagattattcaagttgatgaaccagcacttagggaaggtttgccactcaagcagcgccattggcaagcctatttggatgaagcagtgtactcatttaagatcaccacgaccggcgtgcaaaacgacactcagattcatacccatatgtgctactctaactttgccgatatcatcgataccatcaaagcccttgacgcagatgtcatttcgattgaaacgtcccgtagccatggggagattatcagtgcttttgaacaaaccgggtacgatcaagaaatcggtctgggggtctatgacattcacagtccacgcgtaccgagtgttgcggaaattgaagccaacatccaacgcgcattacgcgttatcgacgcccggcaattctggatcaatcctgactgtggtctcaaaacccggcaagaatcagaaaccctagcagccttaaagaacatgattgctgcgcgcaacgcgatccaggcccaattgaccactagcatccactaaggaggtggcttgaatgaagtttaaacaagcactccagcaacgggtcctcgttgccgatggcgcaatgggcacccttttatatggtaactatggcatcaattcggcttttgaaaacctgaatttgacgcatcccgacacgatcttacgcgttcaccgatcgtacattcgggctggtgccgatattattcaaaccaacacctacgctgcgaaccgcctaaagttgacccggtatgatttacaagaccaagtcaccaccatcaatcaggccgctgtgaaaattgcagcgaccgcacgggaacacgcggatcaccccgtttacattctgggaacgatcggtggactagccggcgataccgatgcaactgttcaacgggcgacaccagcaacgattgctgccagcgtgactgaacaacttaccgcccttctagccaccaaccagttagatggcatcttgctcgaaacatattatgatttgccagaactgctcgccgcgttaaaaatcgtgaaggcccatactgacttgcccgtcatcacgaatgtttcaatgttagcccccggcgtcttacgaaacggtacgagcttcactgatgccatcgtccaactcaacgctgccggcgccgacgtaatcggcacgaactgtcgcctgggaccttactatttagctcagtcatttgaaaacttggcgattccagctaacgttaaactagccgtttacccaaacgctggcttgcctggcactgatcaggacggtgcggtggtctacgatggtgaaccaagctatttcgaagaatatgccgaacgctttcgtcagctcggtctgaacattattggtggttgttgtgggaccacacctttgcataccagcgcaaccgtccgcggtctaagtaatcgcagcatcgttgctcatgaccagccggctacaaaaccacagccaccaacgctcgtcacgacaaagagtcagcaccggtttctgcaaaaagttgcgaccccaaaaacggcgttagtcgaactcgatccaccccgcgattttgatacgactaaatttttccggggtgctgaacgattaaaagccgctggtgtcgatggcattacactgtctgacaattcgttagcaacggtccggattgctaatacgacgattgcggcgcagctcaagttgaactacggcatcacgccgatcgttcacttgacgacccgcgaccacaatctaatcggcttacaatcagagatcatgggtctacacagcctgggtattgaggacatcttagctatcactggcgatccggccaaactcggtgattttccgggagccacttcggtcagcgatgtgcgctccgttgaactgatgaagttgatcaagcaattcaatagcggcatcggaccaacgggtaagtcgcttaaagaagccagtgactttcgggtcgcaggcgcctttaatcctaacgcttatcgcacttccatatcgaccaagtcaatcagtcggaagttaagttatggttgtgactacattatcacccaacccgtgtatgatcttgcaaacgttgacgctttggcggatgctctagcggctaatcacgtgaatgtgccagtgttcgttggtgttatgccactcgtctcacggcgtaatgctgaatttctacaccatgaagtccatggcattcggattccagagcctatcttgacacgcatggcagaagccgaacagaccggaaacgaacgggcagtgggcattgctattgcaaaggaattgattgatggtatctgtgcgcgcttcaacggcgttcacatcgtcacaccgtttaaccgctttaaaacggtcattgaattagtcgattacatccaacagaaaaacttaattaaagtacaataaaagaaaccgccgccaacacctactttcatgctaaaattagacatgaattgtaaatgtggaggcggttttgtcatgtacttattagggcacattattggttggctatggctcatgctgacggttgcgattggtctcagtcgtcactcagtcaaatcagccaatcgctttttgattcttagtcgcatcgggtacctgctaattatcatcactggggtggccttggcaatcagaaccttatcaggcaactggtggttgaccttgctaaaagtgatactcggtcttggcacgattggcctcattgaagtggcctttgcccgcaagcaggaaagtcatttgaactctggacttgtcaccctactcgtctgcggcaccttactaacgattatttgtggcatcggcttgcactggcaattgacgggaaacttgatttaaaccatcaatgtcgttgaaattactgcctaacgatccaaagtgatgctatcaaaaaaaacaagtcgtccgttaggggacgacttgcttgcctgatgccaattaattgttacgatcactcaaacgtttcatgatttgctggcgcattcgcattttctggttgctttccataaaaatcagccgcgacgtcccatagttaaagagtcccacgagaacctggtcgatgattttaacaagtaggggtgcccagaacaacaacgaaatgccgacgaacatgaggaaagtatcgaaaaaatatgataagcctcgtgtcaacatgaaactaatgaactcgcgacaccagtgccaaaagtcttgcgatttggactgaaagaccaccgctttgttggtaaaaaaactaaacaaagttgctagcacccatgcgattgtgttggaaaataaatagtgttccgccaagactgagtgtagcacccagaataccaagacgttcaccagcgcggccataaagccaaacagtgcgtatttccaaaaatattgatattgatggtagattttaatcaaccactgcacgccgttcgccaccgtttcttctagctcaaaaatattatacaatagcaatatcataccttgttatcggccccctgacaagctcagccgttaaattggcgcttagtgggctggtcgcttatacttaaactaatctgcaattctttttggagtgaattatttatgagaacttatttatttattgccgggctgatcttagcctgtctaattttaatcattatcttaattgcggtgttagtccatctccaccatgtcaatcaggcggcggataaacaggccgcgttgcttaaatcaattcggcagcgcctcgttcatcaaactttgaccaatcaggaacaagaccgtcaaattaccaagttgcagactcaaaataacggttttcggaatcgcttgaatcaagccgttccccatccggtggcggttcctcagacgcgccggatcaacgctaattcgcgtgcaattttccgctcatacgtcattggtttagattactaccaaaaagaatttgaagccgcgctggccgatgcgagtgcccgaggttactttaaaccttatggtggctataatgattctggtctgaaagcagattatctctatgccaagaagtaccgtgtcgacgctaacgctaacatcggtgaaattcagttagttgaagaagttgatggtgctgagcgatccgtacgggttgaactaaaagttgcggagcatggctataccatcggctatctgccgaaaaagcaggtcgacgaagccttcaacgtgatcgacatttacgctaactcggtcatgaccctctcctccaaaactaatttaactggtggtgaatggaagatggcgatcgatgctgtcgatgaaatgcagtacctgaatgatcccaacgctcaaaatcgggcccttcccgattacggtgccattgacacccccttaaaaatcaagaccggtaaaaagtcctacttcctccaattcaccttatatgaaatggaaatcagcaatgatgagattccattgtatagtttagtcgacacagtcgacggtcaacgtggctcgattgttgaagtcgatgctggtccgatctcatatgtgatcgacgtccaagctgggccacagactgggtccaagattacggtcattcctgaacaaattgaccgcgtcatttgggtccctaactggaaataggtcaatcaccgttatcaagtgaggttattttaatgaaaaaattaatcttagtgatcctgttacttctgtcaatcggtgtgatgaccatcgttgattcgaacatcatccgacaagccccttatccgagcttgtcccaagaacaaacgaaataaggaggtccgaacgtgacccgggcaattttaatcagtttctgcgccctattccttttagcaggctgcacttcccaagctgagccaagtatttccactaagcaagcgaactcagttgcagccgctaaccgcgcggagcaaactagtcgtgccaatgcagcggctgatgctagtgctaagaagcaatctggtgaccattatcaagctgctgacgaccatatcactagcgcaactagtgcagtggccgccgtcgggcaagtgctcaacgatcccaagcaacaaacctttggtgtcgtaccaactgccaatcaagatgcacacggccaccactattatcaggtcgatgcttatcagaaaacggctaatggcggccgggggcattatctgaatagttactttgtttatttagatggtagtatcacgaccaaacaagcaaattaataaaccgacaagttgtcacccattcaagcagtgtcgttgaacctgctgggatgggtgactttttggatgcattttttgccggtagtaatttcagtatttcggcgtacagttattccatgctaattaaggccagccccagtaactaagcaaccaatttgcaattacaattaatatcaactgcataaatatagaaaaaggtttatttttttgttacttttcgctataatggatattgttgttaaagcaactgccccagtggcggaactggcagacgcgcagcgttcaggtcgctgtattggaaacaatgtacaggttcgaatcctgcctggggcataattagtctatgagcaataaaagagccacggtaaacacttatttactgggctcttttattttgtgaattttaacaaagtagtgcctttgcaaagatttttacgcatttcttcaataaggatgaattcataataattttgctcaacctataagtgctggtccacctcacctatccgttagacacactaaccacggcaaacgggccgtagctcccattgttaggggaactatggccttttactaacggttaaataattgttggtcacagtagaaccttcaccaacgcttcagaaactgaggcgattaatttctgaaaatccacaaaaagtcctatgcagcccacgattttagtgtatactagatatgttgacgaaaagttaacgtgatggcggtagtggcgaagtggttaacgcaccggattgtggctccggcacgcgtgggttcgattcccacctaccgcccttctaaaaaagcacgtgcaattgcacgtgctttttatttaatcaaattttctaatcacgccttcagccaagccttcaaagcggctccagtgcgtgaagtgggcacgtcaactgctgctcgtggggttccgctatactgaattcggccgccatactgaccagcatccggccccacatcgatcaaccaatcggcctggctaattaccgccagattatgttcgataataatcaacgagttaccagcggccactaaggcatcgaataattttaataagcgttgtgtgtcttgcaaatgcagaccggcagtcggttcatctaacaagtacaccgttccctgcttgcctagctcaaccgccagcttcaaccgttgcagttcaccacccgacaaagtggtgagcggttgcgccaatgttaggtaacccaaaccgacccggtctaaattcttcaatggctgagccactttgtccatcgtggcaaaaaaagctaacgccgctgtgactgacatctggagcacgtcggcaatcgtcttaccctggtaagcatagctgagcgccgtttcattataccgcagcccatgacacaattcacatgtctgcacaacgggatccataaaggccatattcgtgatggtcacgcctttacccttacaccgcggacaagcacccttaccattatagctgaaccaactagttgccacgccattggctttcgcgaatagttgtcggatttggtcgagcactcctaagtaagtcgccggtgttgagcgaatattcaggcccactggtgtctgggctaaatcaatataagccgtctttaattgccgttttagcgcggtaaccagcgaactcttccctgaaccggccacccccgagacgaccgtcatcacaccgaggggcatgtcgacactgacatcgtgcaagttattttcattaatatggtgtaatgccaagtgggcctggactggtcgttcttgaccccatttatgcggttgtcgcaaccaccggcccgtcaacgtatcagaagccagtaactcgtcataagtcccggtaaaggtcacgtttccaccagtgcgaccagctgcaggccccatctcgacaacatagtcggctaacgtaaacatggctggattgtgttcaacaatcagaattgtgttacccttatccttcagcttcgttaacgcttgcttgattaactgaatatcatgtgggtgcagcccaacgcttggctcgtccaaaatgtagaccatatctactaaggcgctggtcaagtatttggcaatcttaatccgttgcgcttcaccaccagataaagaactggtcccacgatccaatgtcagatagcccaggccaatatcgaccaacgattggatcttggtcgtcagctcccgcacaatatcttgggctaacggcgcatcaatcgcttgtaaaaatgccagaacatgctttaaatccatagccgtcacctgagcaatgttgaccccgttaatatgattggtcaacacgaccggtttgagtcgtgtgccatcacacgttgggcacggtttgcgcgtgacgatcgccgcaatcgcatcgcgatggtgttcggcttccttcttaccaataatcgagcgcttgatccgcggaacaacaccttcatacagggccgttctaggaaaaccttctccaggatgggctaatttctgttgcggtgcgtgcatcagtaaatcgtattccgcagcactataatccttgatgggtttatcattgtcaaacaaaccactcgtcgcataacggcgccaacgccacgtatccggtgcaaaactcacaaacgtgatggccccctcatttaatgatttctcaggatcaatcaattgctgctcatcaatatcgtcaacataacctaaaccttggcaggttgggcacatgccttggggtaagttaaacgaaaaactgtccgaatacccgataaacggttccccaacccgtgaaaacaagagccgcagtaacgaataaattccagtataggttgccaaggttgaacgcgcattcttgccgaggcgttgttgagcaatcacaatcgcaacgggcaagtgctcgatatgcccgacgtgtggttgaccatacttcggtaaatattgttgcgtaaaactgggaaacgtttcattcagttcgcgccgtgacgccgctgcaatcgtatcaaaaacgagtgacgacttaccggaacctgacaagcccacgaacaccgtggttgcatatttaggaacgcgaagactaacgtgctttaaattgttttgggtagcgtcgtatacgtcaatggcgccatgtggaaatgaataactggtcatcaaaccttcctttctatcacttgtttgctatcaaaaaaggacctgaaaattcagatcctaagtatcagactgattcatcaacgagcttgacgaccgtcccatagccggttacgatcaaaaaccgtggtgcaacactcatctgagcgacttcagtattgaagttcacataaattaacccgtcgccaccttgatcctctgccttttgtagcagtagtggcttgacttgttcgattaaatcgtcaaaccgttcaaactgatcaacaccatcagattcaaacatcaggtgttttgtgacggagacgacgcccttaatcatatgggagcgctgtaaatcaccagttgtcataaacatttttccaaccccctatcactttaattttacttgaaaacgacgtcactcgcaaacgtaaccaattatttgaccacaagtttttaaaggactaaattaatcgtagggagtgatagtttgaaaacagcaacacaacttttacaacaatatacctttgagcccgttaaggataaaatgcgggtcgaacaacacgccttagccgtccaacatcaggatcgcgccattccattcggacacttcaagatccggttgaaaaatattgataatcaacaaacttatttattggaattaaagcaagcgttacagttgaccaccacgtctgggttccagttacgttcccgactacacggggtgcatgtcaaacatgcacaacacatgatgccgaccggttatcacgtattggcatcactgacgattaaggccgccccacgtgacgctcatgaatttgtacatgacaaaacaaaaatcgcctgcctgattccagttggtgatcacgcggccaaaacattgccagcacaagttccactttatgcgttcacggacaaccatcaacttgccatcaatcagcaggccatggcccagttattcctgacatgcattaagtcccaacaacgccaacaggtcaattaattaacccgcttttataaataaatcgttcgaaaacaatgtatttgcgcaatattaattgcatttggcgaattaattgcgtacaatgtactaaaatagatagtaaaggaggcggtttgatggcaaccccaacaaaaaacattttgctcgacgaacagctctgttttgcgctctacaccgccagcaaacgatataatcatttttattccgaagctttagcacctttcaagctgacttatccgcagtacatcactttattggcactctgggaaaagagtccgatgacggtccgggaacttggttcacacgttaaccttgatagcgggactctgaccccgttattgaaacggatgcaaacccaaggctgggtcgaacgcaagcgcgatacggacgatgaacgccaagtcaacatctcgttgtcgcaaaaagccatcgatgctaaaccagagatttttgcccacgttaattcttgcatggatttacttggtttagatgaagcaacctataaccagattcgcgaaacggttaactttgcttccgaacacatcaaaaatgccgatcctaaaaaggtcgactattctggcgaagcattctaactgactgcttaactaggtcgaggtttttctaacctcggccttttttgttgcgattaaaccaattgatttttgacactagcgtcactttgttttgagactagcccgttcaaggctaatatgaacgatcgttagctagcaccgatcaaataattatgggtgtttgcagccacattaattccacaaaaaataaatcaaatgataaaacccagttgaatttgatagtttagaccgctaaaaataatttaagtatgtattaagggacgattttttgcaggtactgtattcggtgactttggggacgtgcaacaaaaaaatgactctaccgcttagtagcagtagggccaaagagttaggtttaagtacaatatgggggattgtacttgctcgtccatccactttgggggagtaaaatgaacaagtgtataactattaggtacaagtatatactattacataattgtgaagaaagtgtgaagatttgtccgaattatgcttttttattctttatctttatagagcatcaaccattatttctacaattattatatttttagcattcaaccagattaatatcatccgcttgtgcctggcatcgatgcctttctcagatttgcaaatccgtgtcgaaacctgaacactgcggtaaaatcaaccatgggaggtgaagtccgatggaaattattgaccgcggcttggggtggctcggacgcgtgttgctcactgctggcctaattgttggggtcgtgatcccaccaatgttacttaaattaattaaccaattatatcgccagcatcagctcacagcctggcagatcaccctggcaggtgtctatctgttaatttttgtgatcctagcactggcggcaaccgccctaatgcggcactataccggcaactatcaatcagaaaacttacaataccatgactggcaaattattggaatggcctatctcaccatcttaatttttgagggcggctttcaatttataaaccagcttctgtatcaccagaatcaaacacaaaataacgccgccattaaaaatttaatggccggcagtcctctgtcgctttggcttatggcgttgagcgccgtttttttgactccaattgttgaagagttagtttttcgtggcgttctgactaaccttttctttcaacaagaatggctcaaggtcgggctcagcgggattgttttcggtagcctccatagtagttcaaccttaccgagcttcctcatatacgtcaccatgggactcgtgctagctattgtttatcggctgacccgtaaaattcgcgcggccattgcgctccactttgtgatcaatagcctagcaattaccatcatgttactgcattgacgaccttcacgcacaacttcgtcacggcactggccaccctaacttttataactcccctgccagactaataacacgtcaaaaatcaaaaatagcacattaaaatgtaatagccaccaattcatcaggcctttctcacgcaccattcccagaattgccaagccaatgccaataacgggaatcaaacctccttgtaacaaccgataaatcggcaagtaggcccattctgatagcaggattggtcccgttaactgacccaataaaataaacaacaaaaataccccgatattcaacaatgagcaggcaaacgccgtctcggtaatggtgcccatcgcgaggcgaaagtgaaattgaaatcgtaaaaccagtgtcccgatgattccaatcaccaaaataatgccaaccactaacatacagccacgactccttttcttgtcattgttactgtacgctaaaatcaacaatgcgcctagcgcaaaactagaagcttaatgattttttagcaaccccgtaacgcgactaacaactaaataaattcgagtagttcaccgtagcttttatatggcacgctgtcctagtcattaaccatcaaaaaagagccggcaacttgcccgctcacccatctaactctttgtcccggttggtactgttagtactttggcttttagccccacgactttaattgtaatccgcttatgaactggcattttaacatagaattgaccactctgcttattcgaaataacctgacggacatgtttcccactctttaaggtgacaatgacaccgtgcttggtacggccactgattgttgcagaggtagcattttgatggtaaaccacctttgacacagtgagccgatgaattcgtcgatgataatcaccttgcaagctgtattccgaaccaaatattaacaaacaaccggccaaaatcattaagattagtgaccagaactgcttcatgacgccacctccagaccagctcccacagctggcatttaatagtctaagcatacatgcaaattaatctaaaaagccaaaaaaggtgcaaagctcataatagcctgcaccaacgtcattaaaattcacttttgattaacgattttgttacattagagtcttaagcgaagctagctaaacgtgactgccagttcggaacgcttgattaatgcgattaaatcatgcattttacgaatcgcaatatcgaccgactcgccattttcaaagtacccaagctgatgttgcttatcaattcgtactagcatttgcgggttcaccaagaaactcttatgaacccggaataactctgggtgggccacggtttcatcactaatcttaccattgtattgaacaattcgatctgttaaatggagaaccagcttattacgaactgctccagtctcgataaataacacctgatctaatggaacattgaagagctgaccacccttagagtaagaaaacatggccttgctggtgactgcttgcttggtataacgttcataagcaacccgaatatctgtctccactttggctttgaccgtttcttgacccaaatctttcacaataaagtccagtggttcgattcgtcgttcaaaggtcaaaaaggccatttcagaatgggtcgacacgaagacaatccgcgcattaacatccgcctcgcgaattcgagtcgccagtgctaggccatttaagtcttgcccaggatattcaatatctaaaaagtagagtccctcaagatcggaattggtctcgacatagtccaacaacgtttgtgcttgtccggttgctaaggtcagttccatatcaaaatcattaatcataatatgattcttaatgatttgctttaaggttgctaattgttcaggatcgtcttccacaacaaaggtctttaacacgctgctcactcactttcaatactaataataaattcgaatcgttgatgggagctcacttcataagtcacgttagctaatggatctaacaactcacgaacggttgctaacccttgcccatgaccagcacctttcgaagtatgcccagcaaccatcagctcatccaggcgctcaatcggatgattcaatgaattggcaaaaatcaactccaccatgcggggatacttaacaagtgcgaccgcaatctgaccaccactctgacccttcaccgcttcgatggcattgtctaacaagatgccactcacccgtgataacgtcactgaatcaattgcaattgccgcaatcgggtcgttggcttccaagcgtacttgaattccagcttggcgcgcaacggaaaacttactctgaataatggctttcaatggtttgtccttgatttgttctaaattgtcaaagtgtccaaaatcacgatttagactttgcttagacttggtcacaacttgacgaaaatattgttgtaattcaggatcatcagctgtctgaatatactcacccaaggacagtaagatgttttgataatcatggcgaaacttacgtaaattttgataactattttccaaatttttgacataaatatcatattgttgccgttccaaagcttgccggttattttgaacccgcaatgtataactatagaacaggtaaagaaacgttccggcgttgatcagcaagatagccactagaatcaacattagaatccccaaaaatcctgagccaatattataattatccgccgcagtcgtgatggtaaaaaacgcgaccgcaactacagccaaagcactgacaatcacgttcaacgttagcccgtctacaaattgccgcggataacgcttctttaagaccttgaaactagcggcgactgccaacatacaagctgtgacaattgtttcaccgatggcttcaaatagccagccactccagtcattcaaacccaagttaaataagtgaaaaatcgactccgtcgcataattgccaaagaaactaaaaagaatgtaggcgagtgtggccgttagactcgtcacaataaagtactttttgcgccgtacaaacgccagtaaccccatgttcacaatgaacgtgatgatatccgaatagtcgtcatacaacatgtagatcacagttagaagtacggtcataaccgcaacagtcgcatagactcgcttctgtcgaagctcacgattgattaatatctgcagtaaaaaagccaacatgaccgagtaccaatggtcaaaagctgcaatataccaatagacgtaaacgataactgctcccctccccgcatgatgctcaatactaccattgtagcgaaatacggccagtttgtatatttgtgcgataaaaacttaacaatctttaccaaatcgctgactgaccaattaatacccgtaaccgtctccaaagcttgctatacacgcctttattgtcttaaaagacacacatgatcgacggtataaaaaaagcgacccccgttcattaacggtgccgctcacagatcattattagtgaaaatcacccggcataaaactctcgataaccgcggttgtattaaaggtttcaaaactatggaaactggcttcatcaatttcagcgtagcgaatagcaatttgtgggcgctttgcaagatcgaacatatcaacgtaattaaattcaatatatttcttatgttcactatgaataaagccagcatagctgtcaccatgttttttgattcgaccagatagctgaatcacttgatcgtggtgaaaagcttgcttcaacaatgtttttaagagcgaatgtttagtcttattctgcttcttcagcagcttattcatcaatcgttcagtgttccaaacatcataatagccccgttgcttagccagcgcaatgatcgtcgccatgctcttcaaataatcagtgtcactaattacgcgggctaacgatgccttacgaaagaccactaacccatctagttcaccatcgacattaacggcttggaccagcacaaacttctcatcctgctgaatcacatagccaacactaaattgctcattggttcccttggaatagatttcaacgaggttggtattcttaatcgctttagctaaatcgtcgcgaatcgcactcatgcgtgttcccccattcagtaatttgtaacaaataatttatttcatactaccacattttcaattatcatgataccacttgtaaaagttgaacgccaaatggcaactttcattttctaaataaaatttgtactataaaataaacttgttaataacctctgctaacgcgtcatggttgttatcagcgaccgtcacgtacttagctgcggccttgactgcatcgataccattggcgacactcacaggcaatccgaccgccttcagcatggggagatcattgctgttatcgccagctgcaataatttcatccgccgtaattcccagtagctttcctaattgaaccgctgcggtccccttgtcaacgccagccggattaaactcaacgtaacggtcggacgaataagtgacggctaatttgcttggatcaacaatagcttcaacgtctgcgcgcatttgcttgcggtcagtcatcgttggcaaggccataataatcttcatgacgttcatcgttttgaattgttcaaagtccggcgtcgtcatagttgtgaacgtcacgccccggttttgtagataatctgaatcacttggaaccggattgtaaatatataacgtatcctgcgtgtacacatgcgtcgccgcctgctgattcgcaattcccgcttcaaacacccctttagcaacctcatatggcatggcattcaccgccaatggccgattatccttattctctaaaatcaaaccaccattataagaaatcgaatattgatgtggttggtcccgcaaccccatcgtctccaaatcgttctgaaacgaggtataactacgaccagaattcggcacaaaataaacacccttagccgccgcagcttgaattgccgccgcattcttttctgacaacgtaccattgtcattcatcagggtctcatccaagtcacaaacaatcattttatacatattaaagttccctctcatccgcttgaccatctgaaacttggtcattttaggtttactattccactctagcgaaagacgtgcggaaatgcaaccgctttatttttgcgttgaaatctcaatgtttatccatacatacgcgcagtttttagcacagcgtgcaattataggtgctacagccatttgtgaaatttaacttagtcgtttgttaagacatttcaaaaatgcgacctgctaagaatcaatttctaaaactgaaacaatcaattactgtgctcaatgacccaactttcaaaaaacaatagctttatatgattacgaaaaggtaatcgcagtaccgatgttttaattggcagtatttcttcaatatgttgttaaagccagtacttttgatattattgattgcttatcattccctactgattaggcatcgtacattgacagggtttgctgggaacaggtgccgtgatatggtgaggtaaattcagtatcataattgcacccacaaccaatataataccaaccaaggcctgaggaaccaagatttggtgcaagaataacatgccaaaaagtacggaacttattggttcaaatagtccagtcatagttgccagaaatccgtctattagctttaaactttctaaataaagatcatacgcaacaacggtggctagaataacaatgataagaaccgctaaaagctgcgtttttgaaaatctaactaaatttggtaacggtgtgtgaatcaacgctatcacaccgccaataactagtgcccatcccaaaatatccactgcggcaatttggtttaacaatggaacaggtagtttggtgtataagataaccccgatagccgcaatcaggccaaaaataattgcttccggttttattaatccggtcttaaatccggattcaacaataagccagattcccatcaatgcgcttattaagctcattcctgctaataaactgggaagtcttttcgctttcagcgcggtaaatacaagcagaataaacggactagtggactgaaagacagttgcaactgctgcattactgtaattaatcgcagaaaaaaaggcaatttgtgccgtgcacaagccggcgatgccgtatatcataattcgtgttaaaattcgccaatgtgtccaaatctttttcgtgctttttctagcctgcttgaaaaacaagttacgatatagcaacaacattgccccaccgattaacagccgtaacaatacaatctgttgcggagtcagaacttgctcacttaacaaaggctgtgctagtattccacctagcccaaataaagcggcactaataataccgcacagagttccaactaaacgcttcatacaaaagtttctcctctataatagttcaccattagaaatagcaacactttgattgtggtagtcatcattaaataaggcattggctgctgccctagcaaacgtatctcgattaattgcaaattcagactccggtatcgctctaaattcaggaccgtgcgtaataatttttgtttcgggtccattctgaattagtcctggtctaaagattgtaaagggaataccactatttgcaaataacaacggtttgtctaactgatcatgggtatactgaggatgttgcgtgcgaacagccgataaatagggtaaattaccagacaaatattcaccgtaaataccgcctgccgaaatatcgactattcgtttaattgttgcctgtgtttccttaattgcacgtaacaataacttaacgtacggaccagtgctcagcccaccaacggaatcataaatataatcgacatcctcgagtgccgctacataatcagtatatttcgctgcatctcccagaaaaataacatgttctcgtttctgataggccgggacctttttgcgattacgaacaaataattttaaagtcatttctggataatcacgttccattaatttaatgaaggcctgggcagttggcgaagttgcaccaataactaaaactgtattcatcgttcatcggactccttttccatttgctgatatgttttaataaacccgttcatgaatgcgacctgtttcttaagttcagcctgttttttctctaattctttcagatgatgttcaacaatcgcttgacgcttttccgctgttgcttgcttgccttgaacaactaaatcagttagttgacgaatatccttcaacggcatttcggaatcaataaaaatcttcaaatttttcatccaaatcagattcttttccgtaaaaacacgatacccattctcagatcgtcttagattaggaattaggcccaggcgatcatagtaatggacctgagagacactcatcccaactaatactgaaatctcttgggttgtatatttggcgacttcatcatccaattttagttcctccttttttcgcatgcgattcattataaactatcaaccatacttcatagcaagcttttccaatcaaattggacttgggtgaataatacccacaataatagccgccatttttgacgtcggccaaacggtgcttataactaagatgcaactaacgatcacatcaatatcatctggttgcatttcttgttagagtagcttacgacagggtgatagaaaacaaatcataacattatgtgctaccaaagcaccgtgctaaaatcaaatcagtcaaaatgcaagtacgtgctaatactcggcaaataagccagttaaggagacaccatgaaaacaaaacctgaagccttaatgcgcgacttatacaatttaatcatcaacccggcgacgcgtgactgggaacgccatttactagtccaggccaagaataatcggcaacagctatcgccgactgggcaactaaaacagctcgaagctgatttgcgaccattagctatgcggaataacttgaccccggatgttatggacttttatcttgccatcactggcaacgcacccatgccgactaaaaacaatgtatcggcttacccaccccttagttcgccttatgaagaacgggcagtctttgctggtgggtgcttttggtgcatggttgagccctttgatcagcgtcccggtattaataatgtgatttctggttataccggtggttcgtgggcccaaccgacctatgaacaagttagtggtcaatatacggggcacgttgaagccgtggaaatcagatacgattcccgtaaaatctcgtatcaaaatcttgtcgatatttattggcaactaattgatccgaccgaccgctttggacaaatcaatgatcgcggtagccaataccggccagtcattttttatgctaatcaacatcaattgaccattgcacaagcatccaaacaagcgcttgtggactcgcaacgttatcaaaaaccaattgtcgtggccattgagcccttacagcaattttggccagcagaaaattatcatcaggatttttaccgcaaacaaccccggcgctaccgacaactgaaaaaagcccatgatcactatctaaattggttgaaattcaaaaacaaattctagcttggcggttcagtcacaacttatgactttgcctgcttctggaatcaattggtcaagcactaatcgctgtgccatacttaattgttatggaggcgcataaacatgcggcaaaaatcgcaatgggccctaatcagcttgtggctgattttattaggaagtttcatccacatgggcttaacagtgatgccagtaattgcttataatcacccacagagaccgtttggttggccatttctgatattgctattattatcaattgaccaagtgttttatgaccacttgatcaatctcgttagtcattcaatcatcaaacattaattttaaaaaacaggatattgacccgccatacgaatgccggccgtccattgtcctgtttttattgcggtattttgcatcatgtcagctgtcattttgacataacggtcttaatcaggacaaaccacaactgcctacttcgatatggtatattgttactgtctacatcagatttgccaatttgtttgagtgatatggcctttttctaaccacctcactcagacactaaaaacaacgaggttctcaccatgcaaacaattcagttaagcaacatctttaaacaacaagcacaccaaacgattttaaaagatttcacactcaccattccagcgcaaagtaacatcggcattcagatgagccacgttgaggcaacgaccctctttaacctattacgccaaacgacaccccaaactagtggcgtgatgactggcctcactcccgcacgtatccaagccatctttcatgatgacggcttttatccgcaattaacagtctcgacttatttgaagacctttcaacacatcagcacctttgagacggacctggatgacattttgcagtatttcgcactcaaagacgtcgcccatactaagatcaagcacttatcctttgatcaacaacaacgtctggccttactgcgggcgttcatcctacaaccggacttgttactaattgaaagtcccctgaccaacttgaccaacgctggcattgagctgtacttagcagccttagcctatactcgcgaacacggcgtcaccgtactgctgacctcctactcattagaagaacttgtcctaaccagtacgactatcttccgctatcgaccaaaccagggcctcgagttgactgatttggcgaccgaaagcagttccgattccgcacacacttcagaagatacacctagaccaatttttaaaattgcaagtaaggttgaagataaaacagtctttttcagccccaacgagatcgattttattgaaagtgtcaacggggtcagtcaactgaacgtcagtggcgaacaattcacgtcatcgcaaacaatgagcgaattagaacaacaattgacgacgctcggcttcttccgctgtcatcgttcttacttggttaatttacaacaaatcgcggaactaatcagttactcccgaaatagttacacgttaatcttgaaaaacaaaagtaaactgcccctctctcgcggtaaactcactgatttaaaagctttgatcaatttttaggacaccattcagcctaaataatgcaccattcggccccaatatgccccattacaccttgatttaatcacattcgacgattgttccagtaaactagattttgtagaagccactacgcttccaaatcaaatttaaaggagtcagcgatcaacgatgacaataaaaaatgcaatcgaagtgattaacattgccaaatcatttcaaaatacgaccgcgctggaccaagttagttttaccgtccaaccaggtgaaatttttggctttttaggtccctcgggatcgggaaaaacaaccaccattaaaattctaaccggacaattattaccaacgaacggtgaagcctacgtcctgggtcagtctgtccaagcatacgacgaacaccgctatgaaaaaatcggcatcgtcacgcatcaaagtgggctttacgacaaattatcggtataccaaaacctactattcttcgcgaaaatgtttggtgtcccggttgcacgtgttgataagttacttgaacgagttggtctcagtcaacataagaaaaaactcgctggtaagttatctcaaggtatgcgtcaacggctagttctggcccgagcaattcttcaccaaccgcaagtcttgttcctcgatgagccaaccagtggtttagatccccgcacgacccaagcaattcacgcactgattagggaattacgcgaccagggtacagcgattctgctaacgactcatgatatgctggaagccactcgtctctgcaatcgtgtcgccttactcaacgctggccgcatcgcagaatgtgcagccccacaagcattgcaattaaaatataatcgcgaccagcagtatcgcgtccacattgcatcggcagcgcaagatttgttactccccgcatctcctgagacgacctatcagattaatcagtggatgctttctgggcaacttgagacgattcactcgtgcgagccgacccttgaagatgtctttttaaccgtaactggaaggagcctaaaatgagtttatcagtaaccaaaataaaagccttattcggtcttaaattaagactgatcatttcaaatatgagtctaatgactgccccaatcatggccattttgtacgtcgttttcatgaagagtattatgcaaagtaaagcaccatcacacgtcgccctgatttccctattactgggaatgggactatgctttaatatcgttatgggtggcatcatgatgacgagttatcccttagccgaagaaaaagaacaccatacgttacgtgtcctaatgacctcttccattaccgggcccgaattttttatcggtagtttattgccaccactagctattatgactgtaaccaatttgatactggtccccctaagcggcgccagttggtcgcaaattcacttaggaaactttttattgattactattatcactagtttaacgagtctcgtgctcggatacattattggtctgattgctaatagtcaaactcaagcaggcgtctacagtattccaatgatgctgattttaagcctgataccgaatttcgaacagttcaataccacccttaaatcctttagcagttatctgtatagcagcacgcttaatcactatattaccgcctcgtataccactggtggcttttcatggacgcttcgtgaggtactgacgcaactcggatggctcgtgattacctgtggcatcttcttctatgcctaccgtcgtcacggccttgataatgactaaaatttaggaggttttcaatcatgtcaactttaaaaatcggaacgaccgtcaagttaccaaaaccatatttgggaattgtgggaacgatcattgcctactacgcagctaaagatcaatacttagttcggtttggtgttagccaacaactctacttcaaaccagatgaactaattgtctggaaatcttaactgcttatctcataccaagccccttactttgaaatatcatggtaaggggcttcttttccacgttcggacaatcccgcagccgaatcgacgttggctatgttatagcaattgccgctcaacctagaaggtgtatgtaggacgcacatttactgatgaccagtaacctaactaacacatttttatcataattgatgacagctcaattcatgctatgtatacccataatatttttaaaatcataacttacccttaattttaaaccccacttgcactcaaaatggggtttaaaccccacatgctgtcttgatgatgtggtgctatttctgaaacctgttatcctctttaatgcacacacggggtttcatacaaaatagacaattaagggagcgcaagtaaagatgattaaagcagaatgggcgtatatgcgcaaacacaaactaatgattatcgtcatggcaatcattatgttcattccatcaatttatgccgtgacatttttacgatcaatgtgggatccatacggtcggttaaataatttacctgtagccgtcgtcaatcatgatcagccagtcacgtaccaagggaagcatctcagtgttgggcgcaatttaacaacgaatttaaaaaaatctagcgctttgaagtttcaacaagtcaacgcaagtcaggcacaagctggcttgaaaaatggtcgctattatatggtgctcacgattccaaccaatttttcgcgccacgcgaccaccttactcaatcaccaaccacaagccatggtgctacattatgatacaagtgctggtcataacttcgtcgctagcaagatggccgattcggcggtcacttcgattcggtcatccgtcgcccaaacgattacaacgagctatgccaaaacgatgtttgccgctatcaaacaacttgacagtggcctcaaaacagctgctactaataatcaaaagctagccaccggtggtcagcagctccaaactgccaaccaaaaaatcgccaccaacctggacaccctcgcaactagttcgctgaaactaaaacaagggagtcaaacactgacggtcggtttaaaccaatatcttaatggcatttcacaactacaggtgggtaaccaaaaagtggttgccggtctaacacaactgctcgtcaaaagtaatcagttagttgctggcatggctcaactcaacaccggggttcaaactttaaatcaaggtgttgatcaatacgttgctggcgcccagcgagtgaatactgggactgtcaaagtcaatactggtgcccatcaggtggccagtggcacgcaacaattcagtagtggtaccgctcaactggcgactggtacgcaacaacttagttccggtttaaacgcttatgcggccggtgtcggcaaggtcaacactggtgccaacaagcttagtcaaggtgctaatcaactacaagcacagaccgctcagttaacggctaaaacgacggccctaacgagcggctcaagtcagctaactactggcatccagacactaggtcagaacagtcagtccctcaccatcgacttgcaaaaattgcagacgcaacttaagcaaccaaccaacaatcaagccacgattagcgcaaccgtggcagcgctgaaaaagcaggctgctggtaccgacttatcgtccgttaaaaccgcgctaagtgcgctgacatcggctattaaaactagtgcggcgcttcacgacaatgtcgccgcaaccgctaacagtcaaaatttgactgcggcacaaaaatcagccattttggcaacggttgatcaatccgctaaccgtgacgccatcaacgccgcccttgcgagtttaaccacggccatcgcccagtcgacgcaaccggctctagatacgactgctttgactagggccctcagcgccacgactcaacagcaggctgaccttgtcaccacggtcacccaactcactaccggtgcgcaatcactgacaaccggtattcaatctgctggtaacgcggctaacaaactgagtactagtctaacccagctgaacacggtcctacctaatctcactaatggcattggggccgttcactactggtgcgacaaacttggctagcggaacaacaacgctcacaactaatagccagcagctcacccaaggctttaaaacactggatgctaacaccaacttgctcaatcagagaagtcaccaactggctacgggtgcggggcaagttgccgcgggttctcaacagctgaccgcgggcacgcgtcaactcagcacccagggcaaccagctaacacaaggtgccagccgcgtggctacgggtcttcaatcttgcacagaccaacctacccagcttaacaactggcatctcacagttagttacgggcagtcaacaagtcaccactggcttacatcgactcggcacaacgggtattgcactcgctaatggcagtcagcaactcactagtggcaatgggcaattagccaccggagctcagcaactagccgtgggtgctaaccaagttacaaccgctggtaataagattcaaactggtaaccaagcattagcgaccaaattaggaacggccgcaagcaaggggaatctcaatccatcaaaactgacgtatcaacaagttgccaaacccgtcactacaactcaccaggaccgtgatgatgtaccaaacaacggtactggtatggcgccgtatatgttaagtgtctcgttatttgtcggcgcgctcgccctcaatatgatgtttgatatgtataccccacgcaaacacccgcaatcggcactggattggtggagtagcaaggccagcatcatgctcgtcttttcaatcatggaaagtacgattatgctcggcttgatgatgttaatcaacggactcagcccgattcatccgtttgccacttggttgttactcacgctaacggcgctactcttcatgacgatcgtcgcttggcttaaccttgtcttcggcaaagctggcgccttcttcagtatggtactactagtcttacagctcggtggttcagccggaacgtatccaattcagctgtcaggtcactttttccaaacaatccacccgtggttaccaatgagttacagcgtcaacggcttgcggcagaccttaatgactggtaattctgctcttcctgagatgggcgtcttagcactgattctaatgctgtttattgctctgacctggttgttctttatccgtcgttaccctcggctggctcaaattgactttgaagaccccgtcgccgtcaaagccactcagagtaagttagccacgttggttcggcgaaaggctcaagctaaagcatctgacaataaaacgaattagttatttggatttatgatctcgaaacactgccaaaacgactttctctatatcagagagagtcgtttttagcagctaactaagttgacgactttacccaaatggtgctgttaattctgattcgctggtcaacaccttaacctactaccatattattagtattcgtgaaaatccctactaatattgaaacgacttccccattacttgagactgcttttcacagactcattttgaccggatgtcacacacgctaagtcatctagcttgtcagtcaacagcccaactaactaaaaccattaactagtctcaaatgcaccacaacaatcattcagaacaacattaagtcactatccaaacaaaactaatcatgataccacctcaaattagtatgggtatgctttagttagggacaagcttacggttaaattagattggtatattgattgagtcagcgtttgattttggctatactgttaacagtcaattaataaaggagtgcgagtcgcatgatcaaagaattcaaggaatttattgcccgcggtaacgtgattgatttggccgttggggttattatcgggtccgcttttacggccattgttaaatcgttgacagacaacttaattaatccactgattgggattttcttaggcaaagttgatttatccaatctaaagttcagtatcggtgatgctacttttaagtacgggtcctttctaaatgccatcattaatttcttcatcgtcgccatcgtcgttttcattctggtgaaaattattaataaagtggttaaaaatgaaccagaagaacccgaggaagaagaagtcgatgtttccgcgcaatatctagaagaaattcgtgatttattaaaggaacaggctaaaaaataagtgaaaatagctcccaagcaaatttttcattaaaagtctatatggtattaaaactttttttgagatacaatatattgtgcaattttttataaagaggggctatcatggtgataataacagcaggaatgattggggtcggcaaaaccacgttaacggggttaattgctgaccaccttggaactaaggcattttacgaaccggttggcgacaaccccgtattgccactttattattcggatcctaagaattacgggttcctattacaaatctatttcctcaacaaacgttttgcaatgatcaagaaggcattggccgacgataacaacgtcctcgaccgctccatctatgaagatgccctcttcaccaaagaaaacaacgctgaaggaaacatctctgacactgaattgaatgtttacttgcaactactagacaatatgatgaccgaattgactgaactgcctaagaaggcaccagacttgatggtctactctgaaactgacttcgatacgattctttaccggatcaagaagcgtggtcgcgactacgaacagttcgaccacaaccctgaactggaatcttattactataagatgtggaccgcttatcggaaatggtacgatgaatacgatgctagccctaaaatgaagattgatttacaacagtacgacttggaaaaacctgctaaccaacaagcagtgctggctcaaatcgattctgaattaggcaagattcgcaatccaaccacagtttaattaatcatgctaaaagcgccagtcccgataatggggactagcgcttttattgcgcacaatctagcgagcaaacaatacagaaacttcttaatgactcgcgaccagctaactaggtagcgcgggtagtgtcgcattaccaaacgacaatctttgaatgccgcactagcacaattgcgctcgattacatggctgcccggacttgttgggctaactcaaagttattggtaatcaccgcattgaccgaggctgcgaacaattgttgcattacgattggctcatccactgtccaaacccgttcagcaacatggtgtacaggttgatagtgttcaagatgcaccccttctaagtgttcgtgagtcgcaaactcatccggattacccagacgcgctgaagtcaaaaaagcatatttctggctggcatcaatggcgtaggcccgctgtaaactcttcagattaaacgacgaaaaaacgaccggataaattaagtcagtctgccggaccatccgtagcacaatccgctcgatatcaagataatagtgtcgatcagtcttcaactcaaggttcaagtgaacgggctccccactcactaagtttaaaaattcttgtaaggatgggacgggctctccatttgctaattcaaatctacgcaactgttcgaaggtcagatccgcaatggccccttgcccattagtagttcgatcgattcgttcgtcatgcataatcactggtatttgatcctgggtaagatggacgtcaaactctaagccatcgatatgatgactgatggcatacgcaaacccagctagcgaattctcaggaaacttaacgggaacgccccgatgaccataaatcaacgacatatttggcacaattcttcaactctttccaattaatgacgaccgtttgcacggttatttgattctaacactttattgtacgtattttcagccgtttgcaacaattgtcgaatatcttggcctgcaaaaatctgctgcatcgccgtttgaatcgccgtccgtgcgggaacccaaccatcgacaaagacacctgagttcgtattattaggcttcgttcgtagcatctgattaccagaaacttctaggaccggcgacttcttgaatagttttttcagcattggctcgtccttagcccccttattaacggctaaataaccagtcttggcttgccaatcggcttgcgtctgtgcgctagcgagaaacttagtgaattcccacgcgccatcttggaccgcgcttggtttatcgttcgcaatccaaagtgccgccccaccaactgcgattccgttggctctctgaccattcggccttgggaaatatgtgacacctagatcatttttgagcacttgatacaactgacccgtgttcgcggacgattgcatgaagatacccaaatggcctgccaagaaagaagctgcttcatttgcagcagcattaccacccgaaccaaagttcataaagtcaccatagtcaatattttctttaacccacttcatcgcattgatagccgcgggactcgtaaagtcgaccttagtcgcattgccagtatgaccattatcatgattggcaacgggaacacctgcgttagcgaccagctgctcgaatagccacgaataggcctccattgtcattcccttgactttgccgtgggatttgtcgtggatggccttagcgactcgcgtgatatcatcgtaagtcggatccactggtggcggcgtaatcccgtactgacgcaagaccctcttattataataaagcgccgtttgcgatgcattaaacggcattgctagcaattgattgtcgcgcatcacgatcgccttggcgcccggaatgatttgatcagcatcgtaatggtcacggtcaataaatttctgcatcggtgtcgtgaaaccactgtgatacatctgactggtggaaatatccatcgattgaaatagcgctggtgacgcggccgtcccatgcgtattcaagattttttgaatgacgccattatagccaccctcaaactcggctacaacttcatacttggactgttggtgattaaacgctttaacgtaggcgtcaatcgcttgttgaccaggacctttcatctcatgccaaaacaccactttaatgcgactactatccgcatggacacgggtccgactataagcgaacccacccactaccaagaggacaaccatcataccggctagccactgccactttcgcgttatcttcatcatttcaccgaaccttcattcaatccagatttaaagtagtgttgcccccagaaaaggacaatcaatgttggaatcaccacgatggcggcactcgcctgaacgagtccccaattcgtagcggtttcttccgaatgcaattgccgcaatccatcttggaccggacgtagccgatttgaaaacgtggtcagcattggccataaatattggttccagcttcctaaaaagctgtaagcagctagcgtcaataaactaatccgtgagtatggtaaggcaacgcgacagtaaaattgccagtgtgagagaccatcaacatcagcggcttcctttaagtctcgcggaatttgcagaaaggcttgacgtaacatgaagataccaaaggccgaagttaagaacgggataaccatcaccgcatagtgattcaacaagtgcatcgcacggaccgtgtgaaagttcggaatcacttcagcttcaaatggtagcatcatagttgccaagaccaagtagaacaacgcatcccgatacttaaattctaaaaacacaaaggcgtaggcggcaattgatgcaaaaaacagatgagcaatcatctgaatgattgaaatcattaaactgttaaataagtagcgaagaatgggggttttggtaaacgcatcctgatagttctgccaagaaagggttccgctcagtgatcctttcgcaatagtcgtcgttggtaaaaagctggtccacaaccctaaaacaaacggtaaaataatgactaacgttaatgtaattaataacaagtaccggaatccgataccgattcgatgtcgaatcagggcttgagtagccatcgtattttccattagtaatgcacccgctttgctaaaagtttgaattggattaccgtaatcgctgcaataatgattgctagtatgatcgattccgtgctagcaagcgcatagttaccatcaacgaaggcatcccgataaatacggtaaactaataagttggtggcgttcgtaggcccacccgcagtcatcaagtcaatcaatccgaaactcttgaacgctgagatcaacgtaatcaccgccgcaaagaagagtgtgggggaaatcatcggcaacgtgatatggatgaactgataacgccgactggtccccgccacatcggccgcatcatataaggttttaggcacgacttgcaatgccccaaaaaagatcagaaaagtaaatccgaggtgcatccaaacactcgtcataataattgccaccatggcccagtgtggctccgttaaccaattaattgccggtaagtgcatccagatggccaccttattcaacaagcccacggatggattaaacatgaataaccagaaaattgcggagaccgagacagacactcccatagtcgaggtaaacatagttcgaaatagctcgataccccgaaccctttgattggcagcggccgctaacagtaaccccccaattaacgtgaacactgtcacacccacgacatagattccagtggcttgcaggctagcaagataactcttagtcgtcagcaaattaaggtaattttgcaaaccaacaaagacggttggttcaccaagactattagtcaagaaaaagcttagatacaaggtgcgtaacattggatagaaaacaaaaacactgagggcgagtattgagggcccaagaaatagccaagcataatatttatcattacgctttaattcaaaactgccggtctgcacagttgcttggtcatgcgcatctggcgattgtttcggcttaaggcgtcgcttaatcgacggaaacgagttgatcactagtaacaccctcctcttcagcaatcagttgttcgtgctcatcaaaaatgaagatcttaccattaacggttacattcacccgttgttcaagtggtaattggacctgaccagattgtgcaactcgcaatgccgtcccgttatcagcctgcacttcgataatcgtcatctcgcccagtgtctcgacattcgtgaccttgccattaccgcgctcatcagtaactggtactacgtttagctgattaggtcggataccaatcgtatagctccccgcgtttaatggttggttaagcgcaatctgaaagccctccgcgacgtgtaaattacgagcggttttcgtcaccactggcagtaaattaatctgtggcgtaccgaagaattcagcgacgaaatgattagcaggatgattataaatatctaacggtgtatcaatctgctgcacgtgacgctcatttaacaccattacgtgatcggccatggtcatcgcttcagtttggtcatgggtgacataaatcaatgtcaatccgagcttacgttgcagttcgcgaatttcggtccgcattcgcacgcgtagttgcgcatcaaggtttgataacggttcgtccatcaggcaaaccttagcatcactggcaatcgcccgagccaaagccactcgttgccgttgaccaccagatagttcgcgcggcttgcggtcacgataagccgtcaaattgaccatcttcaacgcggcattgacccgacgctcgacttccgcggccggcatttttcgtgcttgtaaaccaaacgcaacgttggcagccacgtccaaaaaagggtacaaggcataactttgaaaaaccattgacagctttcgatcttttggtgggactgcattcatgatctgaccattgatggccagctttccactagtaattggaataataccggcaatcatccgcagcagcgtacttttaccacaaccggatggcccaacaatcacgaataactccccgtcttgaatctcagcatttacatcgtttaaaactggctgtttcgccttatcatacgtctttgtgatgttctgcaaggtaattcccatattcatatcccctcgaccttttatttgtaatttattagattactctttaatcatgccagaccaacgtatcgggaatgttggcataatgtaaaaataacgtatgggttatgtatttttttcataaacagcgccccaccaacaaattcggagtgaataaaaaatagttgtttcaagaatttgtacattctcgaaacaactatttagtctgtgtcctaccagttaatctgtcatggatgataacggtccaccgtgagtcggttttctctgtgtccgatatcgagcttgaaaaagccgctcaaatgtttatccggacacactatcggatgtcctaaaaatttcaattaaagccgacgagtggtatgctttggcagtttgactggctgttgatcagcatctgtgcgcaccaccaacgtgtcacaggtagcattgcgaatcacataagcagcattagagccaattaacacccgtgccacgttgttaagacctgtggccccaacaacgatcaagtcagtgccatagcggtccggtaaagtcgtcgctaacaataacttcgaattacctgaatgtaagtgaacccgcacatcgctgacacccgcggccatcgcttgttggcgagccttagcgagattcgctttaagaccggccgtcaattcgttcaatgcctgcggtgtcgttgcgccaaaacccatcggcccttgagtcacaccaataaatttctcagtattaatgaccgtcacaatatccaaagcggcattttgctcgaccgcgatcttaattgctttcgttaaagctaattgggactgaggactcgtatcgatgccgactaaaatgcgtttaaccatcgtcataaccatcaccctccattaaaggatcactatttgtcggttgctaacacggcaattgattcagcgtaaatcgccattgcagccattaattcgtcaattggttggaattcattggcttggtgcatcgtatcttcggtatctgggaagagtgccccaaaggcaaccccacgagccatcatccggccataagtcccaccaccaacaatttgtggttgtgaggccgtgtcaccagtttgacgccggtaaacgtccatcaaatccttgacgatcgggtcttcagggtcaacgtaatgtggcaccatgaagtcaccctgcgtgaccgtggcaccagctggtaactgcgcttggactttcgccgttaaatcagcaggttcgattcccttcggataacggaagttcaacgttaacgcaccacccttttgatggtcgaagctgagtaacccgacattcatcgtcaaatcacccataacgtcatccttgtaagctaagcctaactggttcgcccgcgaatcatcgtgtagcttattagccacgaagtctaagaaagcagcggcatcatcagcaaaggcatagttagtcaagaacgttgcaaggtaggttccggcattgatcccgttacgtggttccatcccatgggcggcctttccaacaacttccagcttaacgccttcaggaacgaccgttaattcaccagttactggttgctggtccaggaacgctgtgaagtcggccaccaactgctcgttgtcatccgttgcgaccacggcttcggcatcacgcggcaccatattttcacgcaagccagaatcaaaagaaacaaggttaaagtcgccattatcttcatgaccgaagtgtaattgcagactcacatttcccttttcaccattgatcaacgggaacatggcatctggagagaagcccaaggttggcgctggttcaacttcaaagtagcgtttcattccagtccaattactttcctcatctgtcccaacgataaagcgaatcttcttattgagcttcaagccaagttctttgacaatctttaagccatagtaggccgccattcccgggcctttatcgtcggaaacgccgcgggcatacatcttgccatccttgatggttggttcgaaggggtccgtatcccagccgttaccagcaggcatttcatccacatgggctaaaattgccaaggtttcatccccctcaccaatttcagcataaccgaccaagttatcaatgttcttggtcttaaagccgtcgcgttccgcaatcgctaaaaacgtggttaacgcttgcttaggaccagggcctaagggtgcatcatccgtcgcctggctatcgtcacgaaagctcggtacgcggagcatggtggttaaatctgctaaataatcatcttgatgcttagttgcttcatttttccaatcaactgacatgttaaattcctcccacatattgttaccttaattttatcatagctatcgtcaacttaataatcgtaagtaaccgcttttggaaaatggtatactcaaagtaaattaacttagaaagctggtcattttatgcaacctattacaactgaaattgttagccgaacgattatcaaacgaccggctgattctcacaaaggcaattacggccgaatcatgctgattgggggtaatcaaaattttggtggtgctatcatcatggccgcaacggccgcaacatatagtggtgccggtctggtgacggtcgctaccgacccgtctaatttcacgagtctacatgctcggctaccagaagccatggtcattgactatcatcaaacggacaccttattaaacctgctagcaggaatggacgttatcgtcatcggtccaggccttggaacagataccgtcgctgatcagttactgaccgccgttctcgccgcgacgcacgtcccacaacgattggtcatcgatggttcggcgctgaccttgcttgcacagcaggcccgcaccttacccgccacggacatcgtggtcacgccacaccaaatggaatggcaacgacttagcggcatcgcgatcaaagatcaaaccccaactgccaatcatgacgcgcaacaacggttaggtgttacggccgtggtcaaagctcatcgcacgaccgtctacactgacgaacgagtctggttcaaccccggcggcactccggccatggcgaccggcggcatgggtgacacgttggctggtatgattggtggcttcgtaagtcaatttcataatttcaccgatgccgttctcagcgcggtctacttgcacagtgccattgccgatgacctcgctgcaacgcggtacgtcgtcttgccgcatcaaatcagtacccgcattccgacttacatgcaccgctttagtcagattgaacgcccttagctagctggaccataatgaacacgaacaagccaacgacattatgctaaaaaagcctcaactaaccatgcttgaattcatagttagttggggcttaatgatttaatttaaaccagagtggccgaattcgtaacacgcactattcgcctacgggttggttcgcatccgccttcaacgctgttagttcgtcatcagtcagcgcacgatagttccccgctaataagccaacgggtagcgttaacgaaccaaacttgattcgccgtaacccgacgacccgttcacctaacgttccgaccatccgcttaacttggtgatacttgccttcatggatcatgattcgaatcgtggtaaaattctcgatttcatggaattgaacaatctcagcctgagccggttgcaattcagtcccgtcctttaacgtgatcccatcattaaaattagccaattgagctgcagtgatttcccccgttacttcagcctcatagaccttcgtaacatggtggttcggcgacaataggtcgtgcgatagggccccatcgttcgtaatgaccaagattccctcagtatctttatcgagacgacccacgggaaatagatcgtcacgaaaatccgtcgtattgaacaggtccatcaccgttttcgcagcggaatccgtcgttgccgtgatgaccccgactggcttattcatcacataatagaagtattgttggtaacggacctgcacgtcatctaaaaagacggtgtcactgccagggttgatctgttgtttgccagagattactggctcaccattggcagtgatatgaccatctttaatcagacgacgtacttgagtccgcgtgccaattcgcatcgcatgtaaaaatttatctactcgcataattcacctatttaatccgtaatttccgtcgtaacccagcagctttcgttccaatcatcaaatcagccatccgtgaacggagtgctaagtaaacgtaaaccgcaccaccagcgataactgctagggccacgatcaagaacgattgcgtcttactgtgctcattcaacacaaagttcagcccataaacaactaatcgtgccgtgacatacgttaaaatcgaataaactaaaattcgattgatttttggtaataacttcacgtaccgaattccaaagttgacttccaaatcatacatcgccatcagactcgcaaccatcatcccaatcgcggtcgcaaccaggggccccgccgttgataggaaatagatacatggtaactgaatcacgattttgaccagtaagccgatcaagtaatagcgaataatatcgcggttgcgtgataggccttgcatcagcgccgaaatcaccgtaaaaaagcctaaagcaatcgcggtaaatgctgagatctgcagaatcaaggtcccaatttgatcataactataaaagagcgtgttaagtggttgtgccactgcggccatccccagcgctccgggaatcatgataaataggaataaaataatcgaatcttccaattgtttacgaatattacgcatattatgactggccaatgattcagataaaatcggcacgaccgtcacggcaatcgcagacgccaatgacacaatgatcatcaccaatttgttcgcattaaatgcaaagtaagcatacaacgtatcgatctgcttagtacccaaatggtaaaccagccgcatcatcggttggaacgttgcttgatccaacaggttgaagactgtcgttgcggtatcgatcacaataaatggaatcgcctgaataataatatcgcggaacaattgccagactggaataactagtttgttctcactctgagcagctaaggcatttagctcgggccgtttgcggaaataataccaaccgagtaataagaagctggcagccgccccgacgaatgctgcgaatgtcgattgggtcacggcattcacccaatcgccgtgagcgacgcgcatgatgaaatacgtcgcacccaacatatagatgacccgaaagacttgttccacgaactgtgagattgcggacggcgccatctgttgatacccttggaagaatccccgggtcaaagacatcgatggcagaatcaccaaggcaatagccaacgcatgcaagacgggaatcagattggcatcatagcccccaaaagctgttgaaatcaagccagcaccaaaccataaaataatggcaccaataatcccaaaggctgacgtcaacaacaagccccgcttgaataagcgctgtccaacggcatattcattcatcgcattatattcggaaagttgtttagaaattgcggacggaattcccccgatcgcaattagcaggaaaaaactataaatattatatcccttggcataaagcgcgttaccttgcgtataatcagcgcccatccagataacccacgggataatataaatcgccccgagcacccgtgaaaagagactcccagccgtcatccaagccgacccgcgcaccatcttctggtgcgcttcggcttcagaattcacgtgtgcattctggggctgattagcttttgattcctcagacatgttcgtaacccactttcttaattcaatcctaatcattttagatgaaaaacaaacaagttgcaattcaattccggccttatgcgtgagtttaaccgaactttaatgataaggtcttgacaactgcaccagctattggcgaaccgtaccgccgtccgataccctatggctgatacagaaaaaagaccaatccgtacgctttaccagcggccacgatgcggtctcaaattcgattacagcagagtgccgccatgataaccatttccgctgattaaaccacgttactgctagttttaagttaagcataggcggttgcacacactctgcccaccaaaaacacgtgtgatttgtctcccaaaccgaaccagaacgtcctcagaatctttattcacttaaccaaatcaatcgtaaccgcactaattagttctgtgagtagttaaaaaatcgtgatagcaaccaacaattgtcagtcaccatcacgattaatttaagcgatattcatttaacttgatactggtcgtggtacttagttggcaaccacgttaaccagtttaccaggaatggcaatcactttacgaactgtcttgccggccgtaaattcctggattttttcatccgccagggctagtttttcaagttcatccttgcccatatccttagcgacttcggcgtgcgagcgaaccttaccattaacttgaagcacgatttggaccgtgtcttctactaacttagattcgtcatacgttggccaagtggcgtaggtgatcgtgtcatcatggcctaataatgaccatagttcttccgacaaatgtggtgcaatcggtgacagtaacttcacaaagccttcgatataaatgattggtaaatcgtcgaccttgtatgcttcgtttacgaagaccatcatttgtgaaatcgcaatgttaaagcgcatagcttcatagtcttccgtgactttcttaacggtttcgttgtagattttcgtcaacttaccatcattgatagtcgtgattcggtcgcgaacacgattgttttcatcgatcattaagcgccaaacccgttcgatccacttattggcaccatgtaacccatcggtactccacggaatcgaagcttccaatggtcccatgaacatttcgtataaccgcaacgtatcggcaccatattggtcaacaatatcatcggggttaaccacgttcccccgcgacttagacatcttttcgtgattatcacccaaaatcatcccttggttaactaacttctggaatggttccttggttggcacaacgcctaagtcatataagaacttgtgccagaaacgtgcgtaaagcagatgtaagaccgcgtgttctgcaccgcccacgtataagtcaacgggtgaccagtacttcaacttgtcataatcggccaaagcttcacggttgtgcggatcaacgtaacgcaagaagtaccatgaactcccggcccattgtggcatcgtgttggtttcacgcttccccttacgaccgttttcatcgacgacatttacccagtcgtcgatattcgctaacgggctttcaccagttcctgatggttccaggttcttagttgctggtaaccgcaatggtagttcatcttcaggaaccaacgtcgtttcgccgtcttcccagtgaataactggaatcggttcgccccagtaccgttgccgtgagaagatccaatcacgtaaccgatagttgaccttcttttcaccggcatggtgttcacctaaccagtcaatcatcttatcaatagctggttgcttagctaaaccgtcaacaaaacctgagttgatgtgttccccgtcgccagtgtaagcttgttggtcataatcattatcacccgcaatgacaggtttgattggcaaatcaaatttttgtgcaaattcaaagtcccgatcatcatgagcaggcactgccatgatggccccagttccatatgaagccagaacgtaatcggcaatccagattggcagtttttcaccattaaccgggttgatgccgtagctaccagtgaagaccccggtcttgtccttattcaaatcagtccgttcaaggtctgacttgctggcgattttagctttgtatgctttgatagcgtccgcttgttcgggtgtcgtcaattgttcaactaagtcgtgttcaggtgccaagaccatgtaacttgcgccaaacagcgtgtctggccgcgttgagaacacttcaatctcggtatcatcaggttgaccagcaaccttgaaacgaatggatgcgccaactgagcggccaatccagttacgttgttgctctttgatgttttctggccaatcaatatcgtccaggtcatcaatcaaccggtccgcataggccgtgattttgaggctccattgcttcattggcacccggtaaacatcatagccaccgcgttccgtcttaccatcaaccacttcttcgttagaaacaaccgttccacccatcatatcaggagcccagttgaccaacgtttcagattcgtaagccaagcccttcttatagagctgttcaaagatccactgcgtccacttgtagtaacttggatcagtcgtattcacttcacggtcccagtcatatgaaaaacctaatgaccgaatctgacgtttgaagtttttgatgttcttggccgtaaagtccttcgggttatgccccgtcttgagcgcatattgttcagcgggtaaaccgaatgcgtcccaacccattggatgtaagacattgtacccttgcatccgcttgaaccgtgacataatatccgtggccgtatacccttcaggatgtccaacgtgtaatccttggccagatgggtatgggaacatgtctaaggcgtaatacttcttcttatccgtcgtatctaatgttttgaaggttttgttttccttccaataatgttgccatttgcgttcaatgactttatggttgtatgccatagtagtgcccctttcttgctgccttgtatgtaaaagctagcattgcgactttccaactgactattcaagatggcattttcatgcttcaactcagtaaaagcggttaaaaaacaaaaaaatcctataagccaattaagcttataggacgaaaacgggttccgcggtaccacctatgattccacgttaccgtggcctcttgagaatcttaacgcgaaaccacgtccgtacctacaatcttgttcagccggaagactcgaaggtgagttcatgattggtgaatccccgtttgcaactaccacggagtttctgcaaaacaccagccactactattccttctcagagtcgtaaagttattgttttcatagtagcaaaccagcacgtttttttcaagggcccaagccccgctggcgataaattttatcatcggcattaatcggacccctgataaaaaatgctataataatggcaataatttatttatcggaggaatcagtattgaagcaacgatcctggcaacgttcggacagtttgattctacttatatttataggatggttaggctggacggccgcggtatggcaacgggcgccttggttaacacactttgacaccacggttgctaatttttggcatcatagtccccagtggtttcaacacgcgatggtcacgtatacgcagcttggcaatccccacaccatcaccataatcacgttaattatcggcctggcactctggctgggccataacccacgcggcgcagtcttcttttgggtcaccacctggctgattgccggctacggtaattatctcatcaaacaggtcatcatgcggccacggccaaccgcttggcgacttgtccaaattggggggtatagttaccccagcgggcactcgacaacaacgaccgtccttatcggtagtctgctcgtgttggcatttgactactggcaccgcaatgccttgactggctggctcactgccctcggcataacggccatcttgttaatgatgatcagccgggtcatcgtgggcgtccactatcccagcgatacaatcggtggccttttacttggaagtgttttactatatataagtgcgcgttttagtatgcgttatcggcacggaccgcttcgattgcggccctaattcatgaattcaacaagggggtaacactcattcaactcagttcggcattagcttatagccacgcgctaatgaaccaagtcgtcaatcccggtgaccacgtgattgacgcgacggttggcaacggccatgataccgtctacctcgccaagctggtcgggactactggtcacgtcgacgggttcgacattcaatcagcggccattgaagcgacgacaactgccttagataaagcagcgctcacccatcaagtcactctgtggcaaacgggccatgaacacatcgcagataagattgccgctgatcaacctatcaagtgtgccgtctttaacctgggctatttaccaggtggcgataaacaaatcattacgaaaccaacgacaacgttaacggccataaaagccattcaggaacgcctcgtcaccaacggactcattatcctgctagtctatgctggtcatcccggtggtgcgacagaagcacaagccgttttggattacgtaacgaatttagaccagcatcaattccaagtcctacaatatcagtttattaatcaagtccatgtgccgccatatttgttggccattcagaaacgttaatttaacgataaattagccgaaaagacctgtcagacgattagcttcgtctgacaggtcttttcaattagatacttaacttaaaaaccaatggtaccttacttctcccacggatacttaccgttctcatccttaggggtattacgcatgatccgcttagttccctcgtccatctcgttacgccgcttcttacgattatggtgacgaacaattaggacaagaccaccgatgccacagtacacgatcattcgggtaaacatcttaacggtcccataaatggtcataatcattaacattttgcgccctcccttgccgtcaaatctacttaagccgtgaccttagcaggcttaaagtaatctaacaatgcttgccactgcttgaaaacggcttcttctgaataacgcttggcattttcataggcctgagcactgtattgtgccagctgcccttgattcttcaacaattctaaaatcgttttggtcaattgttgcacatcgccgtctgtcgttaggattccactcttatgatcctgaataatatcactcgggccgtacttcacgtcattggcaaccattggtaacccatgggcttgagcttctaacaacatcaatgagaatccttcagctcgacttggcaaaagtcctaattgggcccggttgtaaacggcattgacatccgtggtataccccttgaacaataccacatcttccaagtgcgctgcagcaacttgtgcatgtagttgcttttcaatatccccgttcgcataaccccataattccaacttggcatcaggaaactgcttgtgaacttcaacaaaggcttcgattgaatgattctgttgcttttcaggtgccagccgcgcaacttgcacgacgaggtctttttgtcgttggtcaaacttcaccggcgcggcttttaacgtagcattatcaacatagccaaccggaatagtgaacgctggaatatccttaccaaagcgggcttccacgtccttagtttgttccggtgtcgcagaaatgaccgcgtcccaagccgcccaattattcagcgcattagcataattattgttcaaggtagaatgcataatatccttagcatcactcacatggttattatgtagatgcaagactttcttagctggtgtggtcatattgaataagccccaggcacattcaacggtccgatcacaaatgaagacattttgttcatcattcaactggttaagttcatcatagaagtaacgggtcagttcattcatcccattaaaagtatggctctgctcgttgtagttcaagacgcgccacgtgattcgctcctgaccagcgtgatttaacaagtgtaacttctccacgtgaatcaatccatccgggccaaagtacgcttcttgggcaatcttaccgtcccagtcaaataattgttcaaaacacttaaagccccgcgtatcccaccaactcatcttgagcgtacgaccattaacgtcaaagtattgcacattgctaacagcttccgtaccggcccgaaggtaaataatcatgattaacttaccacgttccatgacttgaatctgattatccttccgggttttgatagcatcggctggcacttcaaagtcggccaaatcaaacctttgacgcttgaccgactgactaccacaaaagaagtcaaaaagattaacaaaatcagcatcggcaatgttggccccttcaagcacatcgtgcaaattcattgcgaatacgcgggtcacgattttagcggccacatggtgcttcttgaataaagtcagtcggttgatttccgcctgttcgattcctgattttgaaaattgcatgttatcgtttaagaaataatacatatgcgccctcctacttaatacccagtaattgttgccaacggtgccaaacttttaagtcagtttgtgacgtatgaagcttcttaaaggcggcttcgctgaatgccgtcaacttcttcgtatccgtcattaattcgatgacccggtcacgcagcgccaattgattgccaggatcaacgatgaaaccgtcatgaccgtcatcaatccaatctttaggcccataattaaagcgataactaatcactggaattccgtgactcatggcttccggcatactcattggaccaccatcaacaatatcggtattgagcaacagctgataatcatcataacgtgtttctaaatcaggatgataatctaataaatgcacattattcgtcaattttaattcttcaaccagcttattcagcgtcttaagatactctggatcgccgtagccgtaaaagtcacactgaatttctttgacctgttgcttaactaacgcaatggtccgaattaactgatccagttgccgatccggcgccagccgcccaacgtatagcaattgcttggggcgggccgtgattggctgtagtttactctgcgccaacggactcgtagttacagttggtaacactgtcaccttagctttagggaaccgcgtccgcagatgctgagcctgactttcagtagctgtaatgaaaccatcaaagtgttgcagattatcgaaggccggtgttaagaacccgtccaacggggaatgaattgggtcattaatatccttcgcctgataaattggaaccgtcacatacttgtgagaatcatcctgaagttccaacaacggcttcacactggtacctgggcgatcactaataaaggtcgtcgtttgcttgtccaaatgactgagttcggccaagaagaaacgaaataaatggttcgcgtcctggaagaagcgctctgcttgatcacgataattctttaaaatcaaacgtgacgctagcggattaccgttagtgtcaggtacatagtactgctcaataacggtctcgccttgtagattataaaaccgttccaaaaccagtttaccgttctgaccaaaatattatgtactggacttgaagcctcgccaatcccacaggtcagttgaagataagttaccttgattgtcgaagaattcttggtaaaagacgcgcccaatcgttccaggaataaagccgacgttgctaacgtgttcatcaccattaaaaattttgctaaagttggcacccacttctaccgcatattcaactggcagatgcatgtcatcagtatgcagaactttagttggcacatccgtggtttgttgaaagtaatcaaacatattcagcacttgctggtttgctaactgaaaagttcccatggtctgatgtagcaaacggtcatacatcttagtcacaatctgggctggcgctttatagtggttaaataatttcacccggttgattgccgcgtgctcaacactcgaattcttgcctaaaatatattcattaatgaagtaaaacatacagtcaccctttctgttacctagtattatgcttgtcgatatgtgtagttataatagttgatcaacccagataagaagtgttcacaatcgtcaatccgtgtccggaaattgtcatgacgtgcatagaacccaccaatgaacttctgtggattatagagatacattgcaatctcaggtagaaaacacccagtagtaatctcatacaacgcacgataccgcaatacctgccgtaaacgaaccaagtcataaggtgctatcaagtcttcattacctgaacgtttaatcatatcggtcattttgacggccgcatcaactaactcaagtaatgttggatacgtggtatcacgctcttcaatgaattttagatgactgaatacatttttcaaacccagtttcatataatcacgattgtctgggaataccagtaatgcttcattgattgcataagaaatccagtgatcatggtatttaccgtagtcattagccaccatgtaatccaagatttgcttcaccagatccatcacattcttatcatgtgttaactcatatagtcgggaaagcgcaaatgcgacttctccttcataatagataattcgataagctgctttgaccgttaaatctggatttaggacatgaattaacttaccagacggttcttggaagaaatggacgcctttaaaagctttcattaaaactggcacgaaagtatcatccttggtaacgtcttgatatttactcaatgcaagtattaacaaggcctgtccacccaactttagctcgccattatcatcgacgaagattgcgccctctttttcaatcgtggcgttttttaagccccactgaatcgctaacttaacttttgcaaaatcttcagtacgctttgtgaatggaatggcttccagcaaggcatataaggacgaaaaatgccgcacaacattgtaattgctaagaactctttgacgagccggaaaataaccgtagacaaattttccattgccttttaactgattaattaggaaagtttcaccatgttcaatagctgattgcagctcgctctgctcgtcagtcaccacccgaacgcccttaccacaatcctcttgctcagatagattccagattttctgcccgtcagtaaatacaccagcggttgtaaagacccaaacattttctgtctttcgaatatcgactggtagcgctccttcacgcttgttaagatacggctctactcgatcatagtcgacccaagaacccgaacgattcttaccaattcgatgcgctttgctaggacggaaaaatgcttgtccattactttccatctccaataaggctgtcttgaaatctgcatcaaaactaataccgtatcgccaatagttcatccgaaaagtagctgccaatcgcttttcaaaagtttctcttggtaacttctgtgttgattgaactgcttctaatcgaacccaactcgcttgaggggttttggctaattgttgtgcaactgctatccaagcttgcttgaaagaatcgcaacgatagaatcgcacttgggcccgatgtcgatgatccgataccgaaagtgccaaggttacggtacttgtaccgtaatctttcaaatttccagttgcaatcagtgcttgcttaagcttggtgacagtagatttttgcatcttagtcttacctctttcaattttcttttatgtacgccaaaacgggcttcacgcccgttttggttaatagtcttattttacaacgtatatcgttagcagtactaacaaatcagctttaaattttaactatttttgattctcgtcatcttcatcatcatctttacgacgacgaccgaacaagaagaaccaccagccgagtccagcagctgcagccgcggtcaacaagccaccgaaaatcgttccggcattattacttgtatcagatgcagtcttaccattctcgtcagtattacttgagccaaccttatcatcagcactatcagtatcagctgacttcttatccttatcagaatcattactactcttcgaatctgaatcagtctgatcagaagttgcatcaacgtcttgagcgctagcagcggcataaaccactgatgtagcagcagttgctgacgttgttgcagcaccgtcactggatggtgtcgtaaccgccaacgttgcggctgtggccgagacgccacttgttgctgcagcactcaagctagtcgtacttgtcgaagcagcaccgttgctagaagcagtcgatgaagttgtcgtaccagtgccagtacctgagttatttccagtagagcccgtcgtattgcccgaacctgatccagtatttgaactggaacttccatctgagccagaattactaccattgccagaattggttccatcatttgaatctgaatctgtgattgtatcggagtcactgtcgctattcgaatcactgtcagagtctgagtcgttgtcggaacctgagtcgctgtctgagtcagcgtcactgtccgaatcggaatcactgtcggaatccgaatcactatccgagtcggaatcactatctgagtccgagtcactgtcggaatctgaatcactatctgagtccgagtcactgtcggaatccgaatcactatccgagtcggaatcactgtcggaatccgagtcgctgtcggaatccgaatcgctatccgaatccgaatcactgtcagaatcggagtcgctgtcggaatccgaatcactatccgagtccgaatcactgtccgagtccgaatcgctgtccgagtccgaatcgctgtccgagtccgaatcgctgtcagaatcggaatcgctgtctgagtccgaatcactatcagaatccgagtcactgtcgctatccgaatcactgtccgagtccgaatcgctgtccgagtccgaatcgctgtcggaatctgaatcactatccgagtccgaatcactgtcagtatctgagtcactgtcgctatcggaatcactgtctgagtctgagtcgctgtccgagtcggaatctgaatcactgtcggaatccgagtcactatcggagtctgaatcgctatccgagtctgaatcactgtccgaatcggaatcactatccgaatcggaatcactgtcggaatccgaatcactatccgagtccgaatcactgtcggaatccgagtcgctgtcggaatccgaatcgctatccgaatccgaatcactgtcagaatctgagtcgctgtcggaatcactgtccgagtccgaatcgctgtccgagtccgaatcgctgtccgagtccgaatcactgtccgaatcggaatcactatccgagtcggaatcgctgtcagaatcggaatcgctgtctgagtcggaatcactatccgaatctgagtcactatcggagtcagaatcgctatccgagtcggaatcactgtcagaatcggaatcactgtcagagtcggaatcactatccgagtccgagtcactgtcggaatcggaatcgctatccgaatccgaatcactgtcagaatctgagtcgctgtcggaatcagaatcactatccgagtccgaatcactgtcgctatctgaatcgctgtcggagtctgagtcgctgtcgctatccgaatcactgtcagaatcggaatcactatcagagtcggaatcgctgtcggaatcggaatcactgtctgagtcggaatcactatcggaatccgaatcgctgtcgctatccgaatcactgtctgagtcagaatcactatcagagtctgagtcgctgtcagaatcggaatcgctgtcgctatctgagtcactgtccgagtctgagtcgctgtcgctatccgaatcactgtccgagtctgaatcgctgtcggaatctgagtcactatctgagtctgaatcgctgtcggagtcagaatcactgtcagaatcggaatcactatcagagtctgagtcactgtcgctatccgaatcactgtccgaatcggaatcactgtcggagtcagaatcactgtcagtatctgagtcactgtcgctatcggaatcagaatcactgtcggagtcagaatcgctgtcggagtcggaatcactgtcagaatccgagtcactgtcggagttcgaatcactgtcggagtcactgtcggaatccgaatcactgtctgagtctgaatcggagtcactgtcgctatccgaatcactgtctgagtcagaatcactgtctgaatccgagtcactgtcagaatcggaatcactgtccgagtctgaatcactatcggaatctgaatcactatccgagtccgaatcactatcggaatctgagtcgctgtccgagtctgagtcactgtcactatcagaatcagaatcactgtctgagtcggaatcactgtctgaatctgagtcgctgtccgaatcggaatcactgtctgaatccgaatcactatccgaatccgagtcactgtctgagtcggaatcactgtcagaatccgagtcgctgtccgagtctgaatcgctatcggagtctgagtcactgtccgagtctgagtcgctgtcggaatctgagtcactgtcgctatccgaatcactgtctgagtcggaatcactgtcggaatctgagtcactgtcgctatccgaatcactgtcggagtccgagtcactgtcagaatcggaatcactatcggagtccgaatcactgtcggaatcggaatcgttgtccgagtctgaatcactatccgagtctgaatcactatccgaatccgaatcgctgtccgaatcggaatcactatcggagtcggaatcactgtcggaatctgagtcgctatcagagtcggaatcactgtcagaatcggagtcgctatccgaatccgaatcactatcggaatcggaatcgctgtccgagtcagaatcgctgtccgaatccgaatcactatccgagtcggaatcactgtcagaatcggagtcactgtcgctatctgaatcactgtctgagtcggagtcactgtcgctatctgaatcactgtctgagtcggagtcactatccgaatccgagtcgctgtccgagtccgaatcgctgtctgagtcagaatcgctgtctgagtcggaatcactatccgagtcggagtcactgtctgaatccgaatcactatccgaatccgagtcactgtctgagtcggaatcactatccgaatccgagtcgctgtccgagtcggaatcactgtcagaatcggagtcactatcggagtcggaatcgctgtctgagtcggaatcactgtcgctatctgaatcgctgtccgagtccgagtcactgtcagaatcggagtcgctatcggagtcggaatcactgtcggagtcggagtcactgtccgagtccgagtcgctgtccgagtccgagtcgctatcggaatccgaatcactgtctgagtcggaatcgctgtcgctatccgaatcactgtcgccgtcagaatcactatccgagtcatcttcactaacattagcagctaaatcagcatagtagcctgcatcatcagcggcacttgaagctttctttttagcttcagatgcttcggacgctttctttttagcttcctctgcataactggaagcagccgagttttcgccggcagcttccgcagaatctgcatttgattgggcggctgccgcattagaagctgcagttgaagcagctgttgcagctgactgtgcatcagaagctgctgccgttgcttgttctgcgtaggagcttgcttctgagtttttacttgcatattcgcccgcaatgttcgcataagaactagcaactgaaccatattccgtcgcttgatttgcgtagttagctgcttcgctagctgcagaatctgccgcttcagttgaaacagcattaacagtcaagtaagcccggcctaaagttacagttgtcgtggtagtagtcccgttagtcgtattggatccagtaataactaggtagtaataaccggattgccctactgtcagatccgacagattaagtgtcgtaccagtctgaccactcagcgctgttccagtaccgtccgctgttgaagaataataccattgataagtaatattagtcccagtacccgtagtcgagccatctggaacccacgtcaaatcacttcctgcatcagcagttgtatcctcaaggccactaccaattgtaattgtctttgaagatgaatagctagttccgtcagcatttgtaattgttgctgtgattgtcaccgttccattagacacaacggtcaaaaggccagaatcatcaattgtcgcaatgcttgaatcacttgtcgtccaggtaatcgttccagtagcattctcagggttagtcgttgatgtaaactggctagtaaccttatcgtttgagccacttgaactgttcgttggattaatgacgtaatcatcaccagctatggaaatgtttgttgctggaatattgctactataaacatcgacttcagctaaattacttgcaaatgtataaactgtaacccagtttaacaagtcccaagaaaacccttgtacggcttggaacagcaatgatccagtatagcccgctttgatagtaactgttaatgaactactagttgacagtaaaccagcactgtcaaccggattatatgattcaatataagcgccagccttatctaaggtcatccaggtgccgttaacttgaacataccaagttgtttttgatgatagtgcaaccccacctagtcctaatgctgacgaagctgacaaggtaaaggtcccaccagaaacggtcgacgtcactgctgcgggttgagaagtcatcccaccagaaataacaatccctagaattgtcgttgcattacccgtattagtgcttttatatgaattcgtattgtttgaataattcgtcgcgttactagccgccgtactacctaaagccgcattggatgtagacaatgccgcatatgaggttgcttcactggctgccgctgaggcattagtcacatatgagctggccatagcataatcgcccgcagctactgccgatgaagcctggcttgtatactgagctgccatttccgcagctgaagttgcggccgccgctgcacccagagttgtcacggcataattattagtttgtgcaacgtatgagctacccaacgtagtgtttgacgcatactttgcacttaatgaactcgcgacactgattgcattcccggctgccgattcagctgctgacgctgcgctagaagcggctgttgcaatcgaattataataactggattgtgcttgcacaaccgtttgggtaatcgcactcgccgcactcgaagcagcattcaattgatccgttgcgtaggtcaaacgcaaagccgcgtaactttgttgcaaggcagccgaattataattcccgtccgcttcactagctgccgcagcgtatgaactagccgctacagctgcagaacttgccgctgcattataactgctagttgcagtggtattaaatgaagacccagcaacgttatatgcattagcagcgttggccgcataggatgcagctagcgaggcctggtcaccggccacatttgccgatgacgcagccatactagcataacttgatgctaaataatcagcagcggtatcaccgccatcttcattaaccgcatttttcaaagcagtatcgagactagctgctgcctcagatgccgcactacttgcagaactagcatattcagttgcaacactcgcataactcgatgccattcctgcccagatattagcactggtatacgccccttcggcttcataagaagcggccgaattactggccatagttgcaatacttgctgcctccgaagccacactcgcatatgagctagctgcgttgtatgaagaattagcctgtgatgtgtagtagctagctaatgagcccgtcaagttagctgaagaactggccaaactgatcgcactacttgcagcggcagcttgagaggttgccactgaggctgcgctgttggcttggctggcataactgctggcaatttcagtgtaggtcccttctggattggtaacaacaatggtaatcacattaccagctgcttcaaaatttgaagtcaagattaatgctgtaacccgcttaccactaacgactgcttgataataatacgtccctgaagtagttgcagttgttgtatacgttgccgatgttgcaccactaatggtcgtccaagttgctccatccgttgagacataccaaacataagttggtgtaccacttactgaatatcctgaatccaaacccaccttgttggtaattgtcacagtatctccagtcgagacactttgcgttgccgtactcgtcgttaaagtcgcattggaactaacggtttgttcattggcgacattcgtcgaaaacttagcagctaaagtcgcgttagactcagcagttgcagcgtaactagcagccaatgaagatgccgattgggccacccgagcgtatgagtccgcggtggcaggatcactagcactgacagcagattttgcagccgtactggcgacggcgtaggctgacgaagcagagctagcggccgttgcagcacttgaagcataagctgacgcttgagtgccagtttgcgttgccgccacactggccgcacttgaagccgtactctttgacgtattcgccacgtttgcacttgaagaagccgcactcgccaaatcactaattgcagtactattggcaaaaatggctgccgaactagcggtgctagtagctgtgctcccggcggcgtattgactaagcgcctccgttgcggcggaggaagtaactgcataggcagtactagtggcttcatagtcattatttgccgcattactacttacagcggcatatgctgaagatgctgccatcgcaacggtcgttgcgttaaccgcggccgttgaagccgcagctgccgtgctagaagcaacggtttaagctgaggtaacggccgtattatttttgtcgtattgcatggctaagtatgcactgttggctgcttcagctgccgagctggctgctaccgtggctgcagatgccgcactagatgcggcggaataattgctacttgctaaattaattaagccttgggtagcagcactgctggccgttgaggtggccgttgaagccagggctgcgtatgaactggccgcactcgctgcactatatgctaaagagtttgcaccagagtatgcgattgcattatcaacattggaccccacaccatttgtcaatgcgtctaagtacatgtttgcaatactattgtagtgccgtgacaaatcagccgcgttaagcgcttcttgataggcactttgggccgcactcactgctgcttgcgtcgttaggttattgaccaaactagcatagctgctggcaagtgtggcgtatgaaccagctaatgaagctgatgatgaagccgccttagctacggtactatcggtatgtgagctggcagccgataccgacgagtaagctgcaatggctgccgttgaagccgccgtacttgcagacttagtcgtgctggcaacactgcttgctgtcgagacagtacttgccgctacgctagcactgcttgacaaactcgtcgtacttgagctagctgcggaagaactgctgctatcagttaaactcgatgaagtagcgcttgacgagctcgaactactacttgaacttgcgctggatgcgctcgaactagccgttgaaacactgctactactagtacttgatgtacttgtcgcattagtcgtacttgtttcgctcgcagaacttgcgtctgaagcactgtcatcgctgcttgaactatccgatgaggattcggaattactgttcgaggcagtttcactcgaagaagatgccgtagacgagtcactggtagtactagttgacgtactacttgccgttgcagcagctagtgccgccgcactcgctgctgcagaagacgtatccgcccccgagctggcactactagtggcactacttgccgtatcgctactagtatccgccgaaaccgtatctgcatgagatactaactgaggtgcagcagtcaatacaaatgatgccatcgccgtaaatacccaagtacggccgactttaaacatcttgtagtgaacttgcggatctcccctaaaagatttatgtctcagaaatttcatggttttgccttccttctctaacctaatcaaacccgtttatatatgatacaaaaaacacatatatagcatcattggtatacaccatcaatcgttaggctatgcactcataatactatgattatgttttgttggcaatagttgataccgtcaatcttgttacacgttttccattaattttcctaaaatagttaccaaataaataatattaatgaaaacgagtgtaataggcctcataaagcccattacactcatctaacaacttaaaatttatttataacacttatggaaattttattgaaaatttttcagattttttttacgtcaatatcaaataaacgacaaattatgagtcgctttgacaattaatttgttgatactaagccgactaatcctgattttggtttaaatcagccgcgtgttgtgctgccgttttttgtggtccgcgatccaaactattcacaataaaggctagaataaccaaaccaaggccaatcaggtagacccaatgtaagcccgtatataagatacgatgaagtgtcggcaacaaatgagacggtaattgcgttgctgtctgtggattgatcaacttgttcatcatcgccatgttcgttcctgcatggtgctgaataccttggttcatcccaacgttcaacgcaattccaaagattgaaatcatcaacgtttgaccaatcgttcgactcaacgtattgaaggacgttgcgacgcccacgttctcagctggcacaaggtgttgcgacgtgacggtcgttgctgtaattgtaattccgaagcccacgccaccaatcgctgtgatcaggaagaaccatgggaaagcagtattaactggcaaccacgctaagcaaatgcttgtcacgaggatgaaagccaaactcagatacaaaatccgtcgcggcgcccactttgccaataaccgacccgtcacgaatgacccgacgatccacattaacgagctcggtgtcactgcgaatcccgccaaagaagccggtacacccagtatcccctgagtccaagttggaatataaacttcaacggccattaggaaaccactgactaaggccgccacggcattctgaataataaacgtgtggtttttgaataaatccatcgaaatcactggttcatccgtgcgactttcacgacgaataaatagccacaaactgagcgcactaatgatccaagcagtcccaacggccacccaactgatagtggcgtttcccaatagttggaagcttagcatcaagcacagcaagaagagcatcagccaaaagctacccaagtagtcgattttcacgttattgtgacgtttgggttctcgtaaataaaattgaaataggaaaagggtgatcaacccaactggcacattaatgaagaaaatccaatgccagctgagcttatcaacaattagtccaccaatcagcggtgccagcactgacgcaatgccccacgctgaactattgaagcctagcactttggcccggcgttcgaatgaataaatatctgcgataattgtcattgagactggcattagcgccccggcgccgattccctgaatggcccgccaaaaaattagcaccggcatcgaattagacaaaccgctcatcatagacccgataataaaaataattagtccggcttgcatcactggttttcggccgaccaagtcagtcagctttccataaattggcgtcatcatcgcattagtcaataaataaattgagaaaacccaattcatcaatgaaaccccgtgtaaatcaccaacaatcgttggcaaggcggtcgacacgattgtcccttcaatcgcactcataaacgtcgcgacgtaaatggcaaccgtaaccgccattacgttagttttacgctgttgcatcttagtaattctccttctctatcaatcattttaaaaccccgtgcatctaaaatagcccgcaaaaaaaagcgaccttgaaaaaaggtcgcttttagcgtcgagtacctacagaccgtaacgaatcaacgttaccgcattatttaaatgctgcttttaaagcatccactttatcagtatgttcccatggcaaatcaatatcggtccgaccaaagtggccgtatgccgcagtttgccgataaattggccgttgcaaatcgagcattttgataatcccagctggacgtaaatcaaagttttcgcgaatggcgttaatcaacgcttcatcactaaccttcccggtcccggcagtatccactgcaatcgaaactggttcggcaaccccgatggcatatgccaattgcacttcgacctgatcagctaaaccggcagccacaacgtttttggcaatgtaacgagcagcgtaacttgcagaacgatcaaccttggtcgcgtccttaccagaaaaggcaccaccaccatgatgggcaaaaccaccgtacgtatccacgatgactttccgaccagtcaaaccggcatccccttgaggaccaccaataacaaaacgaccagttgggttcacaagatacttagtttggtcatctaataaatcagctggtaacacagccttgatgacttgatcaatgaccgtttgccggatcgtgtccaaatcaacatcaggatcatgctgagtagacaagaccaccgtgtcgattcgcttaggttggttgtcttcgtcatattcgaccgtgacttgggccttagcatctggacgtaaccacttaatggtaccatccttacgtagcgctgcaattttacgcatcaaccgatggctcaatgcgattggcagtggcattaattcaggggtttcgttgatggcataaccaaacatcatcccttgatcaccagcaccgatttgatctaatgggtcagcatcgccagaacgcgtctccaaggaatcatcgaccccttgcgcgatatctggtgattgttcatccaatgagacaaggacggcacaattgtcaccgtcaaagccgtattgaccatcaacatagccaatcgacttgatcgtgtcacgcacgaccttttgaatatcaacgtaggccttggtcgaaacttcaccgaagaccagcactaatccagtcgtcactgaagtttcaacagcgacccgtgcttgtggatcctgggctaacattgcgtccaagatagcgtcactgatttggtcagcaatcttatcaggatgaccttcagagacagattcagatgtaaataagtgtctttcactcacaataaattcccccttgataatttcggttacaaggcatctaagcatcacttattcttcattgaacaagctaaacttatcctttcgggaacggctcataactatataaggttatcacaatcaccattttttttaaagatttctgtcaaattattgacgggaactgccccgaccggtacgattaactcattatcctaattagagagtgttgacaatatgattcgaatcggaaaattacatattaaacgcgattacatcgccttggcgatctttaccatcgttcaaagcatcattagttggtgggccgccctcgattacgggcgctcatttcaaacggcctcattttcagccgcgcagttaccactgattggctacaccttagccgtggccgccgcggtcttcattatcttagatcggcggattgctccccagtggagcctcattgcaattggaattaccgtggcctttgcatttaccaacattattgccaaggaatccgaactactgtacctgctattaacgtgcagtgcgtggttgctcgtgatggctgttccacgcttcggtatgcaaaactactttggtctagtcgttttcggcgtcatcatgacgttcacgatcccagtggccgtcttcgatttacaaaataactatttatcaactacttttctctggaaactggcccccatgctggctagttatgtcttcctatacgttccgagcttcagccgtcagcgccaaatcaatcaactgatttcggccatcactggcctgctacttgttatcaccatcttcctgcagccgctgacctggcaaacgatcgttgcaattctcatcacgattgctgtctggttcagtcaacagtcctttggccgtactcggttacatctcatgatcaacgtagccgttcagttggcactgattttattactttattaatatctagataacaacaaggcgtctacctagtctcttaaactcggtagacgccttgtttgcccctatcaccggttcttaaagtgctgctattaactggcgccacttttcaataatcgtctgcttgctgtaacgagttgctgaattgtaggcattcgtaatcagttgtgcttgtcgttcagggtgctgtaaatactgacgaactttcattgtcaactcatcaacatcattgggtgtcactaagtacccgttaacgccatcttcgataatatcttccggcccgtacgcaattcgatagccaataaccggcacgccatagctttcagcttccattgtggctagcgaaaagccctcttccacactcgtcattaaggcgaggcttgcccgctggtactcttctgccagattgggcaagaaaccccgaataacgatatttttttctagatgattggcctgaataaattgacgcatttgcatttcaatcttttgcccatgcccaaacaactgcaaagtcaggtcgggaaattcaccaactaaccgacgaaccacttccagttgatgtggtaattgcttttctggcgaatagcgcgccacactaataatccggtgcgggtcacgaccatcaattttaaccggatgaaccgttgtatagccgactggaatcacgacaactggtggtgaattatcatagcgtgccaataaatcacgcttttgatgctcggtcgacacaataattcggtgaaattggtctggatgggctaggacataccgatagaccgatttcaaatgcccacttaccacgtcctcaccaatccgtagatgcgtgctatgtaagactgaacacacgcgaattgcggggcgcgtatgacctaaggccgccgccgtttgtcggttacgatcacagaaatagacgtcatcagaagtggccaactcattgaagaagaatgtctgaaaagcctgttcggtattgaagaaaaagtctctttgttgatagttcttcaacgtaatcagtcgtagttttggctctggcccggtaatgtcatactgtttgataattttgacttgcccttgtaaatcataatacacttctgtgtgcacttcctgatgtttcactaaaaagcttgtccggctcaggaagccccggttatcataaaattcgcgtcggactttaacaccctgattatcaaaataattgacataatccaattgttgtcgcccggcgtccacaaaatgaacgtacatcaaatattgaccatcggtacccaggacgcgaaaatccgtcgtatttggaacctgaatcaccttaaagtgacaaacagcttgccaatagtgcatccaatcatgatggattttagtcactgcttcaggcatcgtcccctgaaagaaatcatacaaacggacatagatgttggcaattgtgttaacatctatttttatatcatgccggcttagctcagttggtagagcatcggtatcgtaaaccgagggtcatcagttcgactctggtagccggcacttgtgaggtgggacgtggttctcgcctttttatttttaaatagacataaaatgattggcagctttgcgcaaacgcaaagctgcttttttgatataagaatgttagctatttgaatgccgaagtatcaaaatgatcgtaagggcttagtaggatgatgcctattgtcgccactgctttttaggtatgcttagcatatcaatcttgcggtttattataattagtcgcaataactgtaaattacatgctgcgaacaatcatagccattttaatagcggtactttattgttgataatttcagttttgttttttttgtttaattagatttttaataccaattgcgtattttcagcatttgaatgctattaattattttatattaaattagaatttagtgttaattttagaaagctaaaagccttataaaatgttctatcaactagtttttggtgctataaaaggatttaagactatttatgtatggtggatattaatttaattaatggttattagattagaaaacggttagtgctattgttgattaagattaaggctagtataatagttattatgtttaattaagaaacaaaacttgttacttttaaacgaaatacaaactggttaagaagtttggaggaatctctattggataaggaacaaaagctggatcggtcgttctttggccaaccccgtggcttacggacgttgttcttcactgaaatgtgggaacgattcagttactacgggatgcgtgcgctactgatctattacatgtactatagtgtcgctaaaggtggtcttggatttgaccaagtcaccgcagcatccattatgtcaatctattcggcattagtttacgtttctagtgtcctcggtggctttctaagtgaccgtgtctggggtagccgtaagaccgtctttattggtggggtcttcatcatgttaggccacatcgttttatcaacgccatttggagttggtgcactatttgtttcaatcgcacttattgtcattgggactgggttattaaagccaaacgtctctgacatggttggtcaattgtatacagtggaagatacacgtcgggatgctggttttagtattttcgtcttcgggattaacttaggttcattggttgcaccagccttagttggtcggatcggcttaaatgttaacttccacttaggcttctccttagctgcgattgggatgttctttggtctattgcaatactactttgatggtaagaagaatttaagttctgctagcctctatccaactgatccattagaacccggtgatttaaaaaaaatcatgcggtggacaatcttaggaatcgttgggattgggttgattctactattaatgcaattaatgaatgctcttacgttagcaaatgttattagtttaattagtacgcttgttatcttgacaccaatcgtttactttattttgatgttaacgtctgacaagactaatgcaacagaacgttcacgtgttcgggcttatatcccattgtttattgccgctgctttattctgggcaattgaagaacagggttcgtccgtacttgcgttatttgcagctaatcgggttaatttggatcttggttttacccatctagctgcttctgatttccaaatgctaaacccattgttcatcatgatttatacaacaccattcgtgtggttgtggactaagtggggtaaaaaacaacctagttcaccaactaaatttgcgattgggttgctattcgcgggggcttcttacctagtgatggctgtacctggagcgctctttggaactgcagggaaggttagtccatggtggttagttgccagttgggcagtcgttgaaattgctgaaatgttgatttcaccaattggtttatcagttaccaccaagcttgcaccaaaggcttttgcttctcagatgatgagtatgtggttcctaactgattcggttggtagtgcgcttaatgcacagattgtccgtttctactcgacgcaaaccgaagtgccatattttgcgattaccgggattgttagtgtcgttttagggattatcctctttatgatggtgccaatgattaaacggtcgatgcaaggcattcgctaaattgaatatttactcgaagatatgttatcttagtggtagcatatcttttttgttttggaggggttgaccatcgtacgaattgctttcagtagtgataatcattttgatgttaatcgagtggatgcgactgcgatgatgcgatctcaggcgacctatcttttacagaatggtgttcagatttatttgattgctggcgatctttttaatgactttcagcgtagtcagcagtttgtcgtcgatttacaggccctattaggcgcacagacgcgtgtttactggattgcgggtaatcatgacatggtccatggcatttcgtttgacgagcttgaaacagggtattttgatggctacctgcataaccggtatatcgatatttctggtacagattggcgcgtgattggacataatgggtggtatgactatcagtatgctgcccaggtccctgatacgactgcggccgacttcttacactggaagaatgcgttttggatcgaccgggctattaaacagccgatgagcgatcaggagcggactgatttaatgctcaaccaagtaaaagcgcagcttaacttggctgctgtggatcacaagcaagttatttttatgacgcactttgttccccggatcgattatttgcgtttttctgatgataatcggttttggaatatggctaacgcgttaatgggaacgccccggttaggacaactgttggagcagtttaacgtggcgcacgttttatttggtcatttgcacgtccatccgcaaccgcgggtgtttggtcagaccacctattatgaccaagcagtgggctatggactcaagcgtatcaatgaatggcaagccaataattttatggcggagtggtatcaagatacgcaaattctggatttgaaataaaaactgaaaaaactttgaaaaaagtcttgattttttattcaaaattatgtattctaatatagttgaatgatttacggaggggtagcgaagtctggctaaacgcggcggactgtaaatccgctccttcgggttcggtggttcgaatccactcccctccatttcattattgggctatagccaagtggtaaggcaacgggttttgatcccgtgatgcgctggttcgaacccagctagcccaattgttacgcctttcgtcgttaatcaggtcttaggatcttgatgtaacgacttttttattggcttaaatttatcttaatatcggcgggtagtgccacttcgtgaagaatgcgtaacggattcttcatgaagtggatttttttgtctcggtctgtttatttgccatcatcaataataatgtgatatgttttagtattctatttggggcacgatccagatgggataggaggtctggtcaatgaatttatttattccgtaagtacacggaagaggttaatggctggcattgttaattttaaaaatacgtactagttaacgcgtcatgacggccatcacaattattatgagtcgttcttataaaagcacaccaatttttaaagcacatatgggttatggaaagaagcgcgctagccgtgctgttcgaaatcgtatgaatcgtggtgaatttgatgatttgccggctaattcgcatgcctggtataaacgatgttatgagcagtatgatgttgtcgattattgctccagagagacttattcgcaagttcaacttgagctggagacgatgcgattagagattactcgtaacggtgggattattcgaagaatcccacaacatctggttgttacgtatacttttgatccggtgatatctgatattgtgcacatgcagcgaacggaagaactaattcctgcgcaagatgtccaaatgtttgtaggtacttttgaacagtggtgtcgggagcgtcgcaactgctgggccaaggcttattatcgaaaataagtcgtattggaacttgatctatgagatttggttgaagaggctacgtagccttagttgtcccactaccagccccaactagttgactgaataaatcaaattttccacagaactgttatcaaattcagtaacggcaggctgtccagcgtcgcaataatgtttgggcagcttttttgcatggcccatatctggattcaaaggcatttacctgccagagatgacgtggttattaagtatatgactagcagtcagttattcagaattataagatgtttattcaatcgaacctcgaaaattgagtttgttagcgttaagcttaatttaagaaatcataccatcatgaataacgtaagcgaccatgatgatgaccaaggaggatttgaaatggcggtaactaaaattgatttaaaaaccacgatgacttaccaggagcatgcaattactagtaaatcatttgctcgaaaattagggattgaactgccgtttgcgatgtacgcaatggcggcgggtgaaagtattagtgctgaacaatccacgctgacccgcttatttgaggttgttgatggtactttgaccgtccgtttggcgacggagaccgaccaagaagtgcatgcgggcgagatgttagtggtgccagctcatacggtccatacgttggtcgctgagcagccgtgccagtttattcaattagaaacgaaataggccttaatagcgagatgcggaggaattcaaatgagtttaattaacaaaattgatcatgctaaggtcctcaatttaactgaacaaattccactggatgatgatcaagttaatagccggacactggttcaacgggatgatttaagtatgacgctattttcagtcgcaaccgaccaagagattggcggccattctgcccagggcgatgcgatggtcaatattttaagtggagaagcggaaattacgattgaaggcaccatttatcatttaactgcgggacaatcgatcgtgattcctaaggatgcccggcacgcgttatatgccgttcaaggatttcagatgttattggtggtcgttaaacccgactaatgcacgtggttatcgatgagacggagggagtaatatgccgctgtatacgtttattggtgatattcatagtgccgcggatgatctggcagttttattagccgatcctgaagttaccgcgacgcgcttgattttcttgggcgattatattgatggtacggcggcacgctattttggtcatgccaccgagtcagctccgttggcgccgctaaaagtactgacgatggttagaaaacgggtacgggaatacggcgatgtggctttacttggcaatcatgatgaattttggctacggacagctcatggtgatgacaatgccaccgcaacttgggtgttgaacggtggtcaccggacctggcgcaaattagggatttactcctccaatcccaatcatgttcggcgggcattaaatggtgcgctattaaagccggatactgatttcttagcacatttgccactgatgtggcaacatggtcggttactggctatgcacgcgggtgttaactggcaatacccattaacacaacaaacaacgactgacctactgtggattcgggatgactattatgatgacttcacgactggcagtcaccgttggcatcggaacttattcaataaagtcatcattactggtcatacgccggtgcagaccttgactggttcacacactggttatttaaagatgcaggcagatgcgcaagacgttccacgatatctaattgatgcaggcagtcgttcaggcctgtttgatggtggaatttgtgcgttaacgctgacggtcgatggtgaatttgtcagggcgaaacgcgtgatcaagggtcaccgctacgatggtcagcaaatcgtcactccggccatgttggtggatcaggcgcactaagtatcactaaacatctcagagatagaacgtaaaaggagcaggctcacatgatattgagactgctccttttatgatgtcacgctagttactggttttcgcactatttcaagttgattggtttgcaagttctcactgaatcgttactcagcgtaactgaattataggtgtaaatagaaccagccaccaaggcctaaaatgaacaggccaagtccattgagggccgtaaacacgatcaaaaaatggtggattggttgttcatcattgaagggcaacaattgttttaaggcaagcagatttgctagtgaggccaccaatgaccccagaccgccgatgttgacgcctaaaaatagcgctgataaatggggcgtgaaattcgctagtaagatggcggctggaacattgctgatgacttggctagtaattagtccagtaatatagacactgggggctgtctgagttaattggttgagccaatgcgttattgcgggattatgactgatggcgctaacgaagatgaagaagcagataaaggttaagagtagtgcgtaatcaacgtactgaaagacgcgtcggttaatcatgaggcctacgacaatcgttccgataataactagtgaaatgggcaccaaattaaaaatgccaagcataatgaaactgagcaggccgcccgcaagcccgatttgactgcgagaaatgggcgtagatttggttggtgttacagttagcggcaaccgaggtaaccgccggcttaaggcaactaataaagctagactagcaagcattaacggagtcgacaatttaaaaaacgtgaatagattaacgtgatagaacgtgaccaaaaataaattttggggattgccaatgggcgtaaacgcgctaccaagattggctgccatgataattaaagtcgttgggtaggcaatggccaggtgctgccgccgggcgagtgtgagaaagattggaattaacgttaggatcgcaacgtcgttagttaaaatcattgagccaccaaaggccagtaagatgaataattgacacatttgacgggtatcgtgtgatttaactaagagccagtcccttaaagtatcaagcaaatacatcgcgcgaagtaattgaacactgatcatgagtgcaaataaggtgccaatcgtagcccaattaattgccgtcagttggggtgtcccgatgaacaaacttaaaccagcacaaattaatgcaataataaagattttatcgtgaagtgtgcgacgaacgactgtcaccatggtaaacgtccccctcaatagtcagttaattagttctaacttaaacaaactcgtcgctaaatgtaaactgatagacatttttcagataaggatgtagccacccgaacggtaacccaaataaaaaatcgcttcaaagttatgtgtttaactttgaagcgattagtgcttggttttgattgccagttagcttgcttaatgtgtatctagtttatcttgctgagtgttttgaccgaagaaccacaagtaggcaccatataacgcgttagcgagcatcactagttgcaatgctaacattgaggcggctgcaggactgaagccttttaattggttgaaccagataataacgttaatcacgtcgagtgtgatccacgcaacccattgggaacgataaccgttgaccatgaggacactaccgacaatcccaagtggtaacagggtcgcgtccaggtagatttggttaccgttaagttgtttactaaagtgtaagacaatggcgtagacgagtacggctaacgcgaaccaggcacaaccggctaatttgctcaatttacgaccagtcagttcgctggcatcgggttgcgctgccattttacgatgccagacggtgatgccgacaaattgcatgataaggtaaaatgattgcgacgcaatgtcaccaatcagccgattggtgatggccgtagtaagccaagccgcacaggcaataatgccccaactatagttcgtcagtcgcccttgatcaaccagaattaagttaatcacgaccgtaatcccggtcaataggccaatccagccatgtaggctgtaatcgcgacccagaataaaaccaatgatggtcacgattagcatcgtgctcatcatcaacttagtggtgcggcgaagcgtctttaattcattaagtccccgttgccagctgaagacggcgcacatggccgtgggcagactagtgatgtcttgctggcattgttgcagcagggttgataaggtgagtcggaaatggttgttctggttcatagtgaaacactccttagttgtttttagacagccgtgttcggaagcaacgctgtgtttgattgctgtttacattagcttgttcaagcagacctgtcaacgagcttcgcacatattgaaggccgattattaatagattaatcaattggtttcagtattgataagcaatcaccttaatagagtggctcgtgatatttatttgttgatagtgaaagttgagctgaaagaagtgattaattacccacagtttcacaaatattggtatagtagaagagtaagcgggaatgtctgtttaatcctgcctagccgttaatcggttagtggttaatgatataaattataagtcagaggagcgttttacggatgaaaatcggattcattggtgccggtaacatgggccgcgcgattattgatgggtggttaaaacaacaagcggtcgtcccagcagatatttatattcacagtgcccatgctgcgagttatcaaccttatgcgcaaaaaaatgggctacaggcctgtgacactaatttggccgtggcacaagctgctgacgttatcgttttggcagttaagccgaacattgcgttggccgcattaaaagaagttcaagcagctttaacgggcaagtgggttattacaatggtatcaggattgagtttggccgattatgccacggttgtccctgatctccccgttctgagaatcatgccgaatgtgaatgtggcgattggtgccgggatgacggcgttggttggtaatgatgccttaacaccagagcaatatgcggctgggcaacaattattcgatgcgattggtgccacgagtgccatcgctgagaaagattttccaactttttcagccttagcaggtagttcgccggcctacatctatttctttattgacgcgatggcccgcgcaggcgtcaagcacggtttgagcaaggatgcagcgactaagattgcggcgcaggccacgctgggcagtgcgcagaatgttttagcttctgataaaattccgtttgacctgatcgatcaagtttcttcacctggtggcacgacggttgctggattactggccatggaagaggccggctttatgaccgcagtggtgaagggaattgatgcgacgattgcgaaggaacttggcgaatcttaaattacttggtgctagtggttgcaagtttggtctataccgattataattaaaccagataaatccaaggaggaattgttcatgagcaaagtgttaaaacatgccatcatttatactggtctagaaaagatcgatgacggctacattcgtttcggtaaggaaattgaagcggttggtccaatggatgactacgtggcccaacccgatgatgatatcgaatttgtgagtggcaaaacgattgtaccgggcttcattgatgttcatagccatggtggttatagttttgattcaatggacgggaatccagctgaaattaacgaaatggttaatgatatggttgcccgcgaaggtattacgtcatacttctgtacgaccatgacgcaatccaacgaaaacttagatcattcgatggccggtattaacaaggccgccgatgaaaatccggttatccaaggggttcatttggaaggcccattcatttcggcgacgtttaagggtgcccaacctgaaaagtacattaagaatcctaacgttgacttattagacaactggaacaagttgtcgggtggtcgggttaagttgattacttacgcgccggaagatcctggttcgcgtgaatttgaaaagtactgcttggaaagtggcattgtgccttcagtgggccacagtaacgcgactcgtgaacaattattagcaagtaaagcaactcacgtgacgcatttatacaacgcgcaacgtgaattcaagcaccgtgaaccaggtgttactggtcatgccatgcttgaaaacaacatgtactgtgaattgatctgtgatgggttccatatcgtgcctgacatgatcaagctcgcttacgaacaaaagggcgttgaccggatcgaattggtgactgattcaatgcgtgccaagggtgaacccgacggtatcagtgaattaggtggtcaaaaagtgattgttaaggatggtcaagcacgtcttgaagaaggtaacttggctggttctgtcctgacattcattaatgccttcaagaacattcagaagttcaccggttgcggcattgctgaagcggttaagatggcttctgtcaaccaagcacgtgaatttgggttgactaagaaaggaacattggaagccggtaaagatgctgatatcaacatcttagatggcaatcaagatttagtcgcaacatatagctacggtaaaaaagcagctaaataaattagaagtaagggatgagtaccatgagttcgccaatttatattcaaatccacaaccaaattaagcaggcgattgaagcaggtcggtgggccgttggtgaccggattccgtctgaacgggagctggctacacagttcgatgttagtcggatgacccttcgacaagcaatccagacattggttgacgaaggaatattagagcggcgagtcggtgccggcacgtttgtcgcgaatcagaaggtccaagaaaaaatgtccggtgtcaccagttttactgatctaatgctggcccagggtaaggtcccatcaagtaagacgatttcatatcacgtgacgagcccgtcgctatctgagagcgaaaagttggcgttaggcgccaacgaacaagttctacggatggaacgaattcgctatggtgatgatgtgccaatttgttttgaggtcgcaacagttccagaacgactcgtcaagcagttcaccaaggacgaaattacgagttcgttgtatcggacgttggaagagaaggcaagtttagtgcctggtaaggctcaacagactgtttcggcgatgtctgcttctgagcgtatcgcagaatacttgtcagtccggcgtggcgatgcgttgctacggttacggcagatttcgtatttgcaaaccggcgaaccgtttgaatacgtgcggacccagtacgttggtaaccggtttgagttttatcttgaaaaataaccagtcagtcgggtgctgggcacctgattagagtggtgataccaaaaatagctcacctaggatgttattctaggtgagctatttttggatttatgactgaagactgggtacacgcacaaaagcaattgtcatcgtaacgcagtggcttataactggtaatgattgccagttaatgggcttgctggcgcgctatttttttaactaaccgcaagtagcggggtaacacgagcatccgcttgaaacgacttggttcttgaatcagacggtagagccattcaacgtggtgtttttgccaaaataacggcgcccgcttaaccgcgcctgcaattacgtcgaagctacccccgacacccatccagagcgcatcgaggcgttggcggtgttcggcgatgaaaaattcctgcttaggaaaaccagtggctacgaagaccatatcgggttgcgcggccacgatttggtcgacaacggtttgttcgtcgtcataatagccatcacgggcacccgcgacaacgatgccgggataatctcgttgaacgatcgtggtcacttgctttaacacggccggcttggcacctaacaaaaagatccgttggtgctgttggctaccccattctagtagtgttaaaagggtgtcatagccggtgatccgttcggggagtggtgtgccaagaatctgggccccctgaatgacgccaatgccgtctggcgtgatatagtccgcttgcgttaacacctgttggtaatcggggtgttcacgagcgtacattaagatctcggggttagcggtcaccacaaagcgattgcgatgcgcgagaatatcggtttgaagttgctgaacaaaaccagcgttagttgtcttgataaacggcacgtttaagatgttaaccgtgtcaaaagggactgacataagcgacctcactttctaatcataattaaagtataggtaaatcaaggaattctgcaactttttggatgcttaagcgcattcttttataaaaaatgctaaaataagcttaacttactgtaaacacggttattacctacgaaatggagaattatactcatgacgcaaatctatccggatgatagttttaccttgcatacggatgcttatcaaattaatatgatccaaacctactgggaacaaggtattcacaacaaacatgcggtgtttgaagtgttctttcgtaagatgccgttccaaaatgggtacgcggtatttgcgggtctggaacgagttgttaattatatcaatcatttacattttacggcaactgacatcgcgtatttacgtgaactgggtggctactcagacggttttctagattatttagcgaatttcaaatttgatgcgacgattcgtgcggttcgtgaaggggacttggtctttaataatgaaccgttgttacaagtcgaaggaccactggccacttgtcagttaattgaaacggcactactcaatattatcaattatcaaacgttgattgcgactaaagcggcgcgcattaaatcggttgtcggtgaagatggcttactagaattcggtactcggcgggcgcaagagtttgatgcggccatctggggaacccgggcggcttatattggtggctttgacgcgacgagtaacgtgcgggctggcaaaatttttggtattccgattagcgggacccatgcgcatgcgctcgtgcagacttatcgaaacgattatcaagctttcaaggcctatgcggagacccatcatgactgtgtctttctagtggatacgtatgatacgttacgtagcggggtgccgagtgcgattcgagtggctaaggaaatgggtgataaaatcaatttccaaggggttcgtatcgatagtggcgatatggcttacttatcaaaacgcgtgcgtgaacagctagacgaagctggttttccggatgccaagatttatgcgtcaaatgatttggacgaaaaaacgatccaaaacttgaagatgcaaggtgctaaaattagtgtctggggtgttgggacgaagctaatcacggcctttgaccaacccgcgttaggggccgtgtacaagatggtttcgatcgagaatgatcatcatcagatggttgatacgatcaaactttcaaataacgcggaaaaggtctcaacgcctggtcaaaaacaagtttggcggattacgaagcgtgcggatggcaagtcagaaggtgactatgtgacgttgtacgatgaagatccgcgcaacgaagaatcaatttacatgttccatccaagctatacgtatattaataagacggtcagtgattttgatgcgcgaccactattggttcccatctatgaccgcggtcaacaagtttatactttaccaacgttagatgaaatcaaggagtattcatttgaaagtctagatgcactctgggacgaatacaagcgggatttaaaccctcaggattacccggtcgacttgtcacaaaaactttatgatcataaaatgaatattattaacacggtcagagaccacgttaaccataaagatgaggaggaagcttactaatgcggccattacaagctgagattattaaagcgttacacgttgcaccaacgattgatccagaagttgagattcgtcgaagtattgattttttgaaggcttatttaactaaaaatacctttttgaagacctatgtgcttggcatctctggcggtcaagattccacgttagctggaaaattgacggagatggccattaccgaaatgcggcaggaaacgggtgatgatcgctatcaattcatcgcagtccggttaccatatggcaatcaagcggatgaagcggatgcgatggcagcgattgattttatgcaagccgacgtgacggatcgggtggatattcaaccggctacggatgccatggtaactgcattggaagctaaccaattgacgattcatgatttcaacaagggcaatattaaagcgcgccaacgcatgatcgtgcaatatgggattgccggtgaaatgcacggtgctgtcgtgggaaccgaccatgcagccgaagctgttactggtttttataccaagtacggtgacggtggtgcggatattgtgccactatggcgattgaacaagcgtcaaggtaaacaaatgctggccgctttagatgcgcccaagcatttgtatgacaaagtcccgaccgctgacttggaagaagatcggccagcattacctgatgaagtcgcgttaggtgttcgttacgacgacatcgacgattacttggaaggccggacggtcagcgatgctgcggccgaaaagattgaggcgtggtacttaaagactgcccacaaacgccacgcggccatcactgtgtttgatgatttttggaaataagctagttagctgataatcgattaggattacggctaacctaattaaaaaggcgacttgaagattattcagcttcaggtcgcctttttgcatagtcacataattttatggtgactaccgtaatattggtgggattggtggaaaagcggtagaatggtttaaaatatgtaaacgcttaatgtgagaatatccaagtgctgtggcgaatgcagaggtagtcaaagcgattattttgctagacagctcccatggaatctggtattcttacgatacaatcataagggagtaactagcagaaatattctgcggcaatatcgtcagcaagaagccaatccggtattgtcttaaatagtgagacttatgtatgttcacacaattttgcgtgcatacatgagtctcattttctatctggagatcagttagggagtggggctcggatgccagaaaaggagcttacgatgagtacaaaaccaaagtatcaacaagcgttatccgccgtttatgaggaactaggcactgatgaacacggcttacagcaaagtgctgcgtcgcaacggttagaacaatatgggccgaatgcgttgaatcagcaaaaaacgacttccttgttgcaaaaatttattgcgcagttcaaggatttcatgattatcgtcctgttagtggccgccttgattgccgcctttactggggaagccgtcgatgccgttatcatcttattggtggtggtattaaatgcgattttcggtgtcttccaggaatcgaaagcggaagaggccatcaacgcgttgaaggaaatgtcagcgccggacgcgactgttttacgggatggtcagctgcaaacggtcaagagtgacgcgttggttcctggggatgttgtgtcgctagaagccggggatatcgttcccgcggatttacgattaattgagagtgcgtcattgaaggttgaagaatcggcgctgacgggtgaatctgtcccagttgagaagcaggcggagatgattgccgatggggaattaccaatcggggaccggttaaacatggcgtacatgaatagtaacgtgacgtatggtcgggccactgggattgtggtggcgactgggatgcagactgaagtaggtcgaattgccggcatgattgaagcggccgatgagacgaccacaccactgcaagcgaacttgacacagttaggtaagtcgctgacgattttaatcttagttattgccgcagtggtatttggtatcggaatgctgcgtggtcaagagagtttgatcaacatgttattgacggcgatttcgttagccgtggccgcaattccagaagggttgccggcaatcgttacgatcacgttagcgttaggaacccagcggatggccaaacggcatgcgttagtacgaaaattacccgcagttgaaacgttgggaagtaccgatattattgcctctgataagaccggaacgttgacgcaaaacaaaatgaccgttgaaaagttggtcgtcaaccaggaactggtggacgcgcgcgctactgaattgccgcttgatagccatttagcgcaagtgatgattttaagtaatgatacgaagatcatgccggatgggttagcaggtgacccaacggaaacagcgttgattcaatataatttggatcagggttatccagtcgatcagttattgacggaccgcccccgagtaacagaagtcccctttgattcggaacgtaaattgatgtcgacggtgcaccccttagaagatggtcgcttcttagtagccgtcaagggggctcctgatgaattactcaaacgggtcactcagattgaaagtaacggtgacgttcagccattaaccaagacaagccgtgaccagattctaactgttaatcatgaattggcaacgcaagccttacgggtcttagcatttgcttataaagtgatcaccacggttccgacgactgttaatacggagacgttagaaaatgacctggtctttgccgggatggtcggcatgattgatccggaacggccagaagttgagcaagccgttgcagaagctaaatcagctggaattcggccgttgatgatcacgggtgaccaccgtgataccgccgaagcaattgccgtccgtcttggtatcattaacgctggcgaagatgacgctgtgattactggtgccgagttagatgcaatgagtgatgcggaattcggcaaaaaggtcggcgattactcggtgtatgcccgggtggcgcctgaacacaaagttcgaatcgtgaacgcatggcaaaaacgaggcaaagttgttgctatgactggtgatggggtcaacgatgcgcccgccttgaaggctgctgatatcggtattggtatgggaatcactgggacggaagtttccaagggggctagtgacatggtcttggctgatgataacttcgccacgatcgtggttgctgtcgaggaaggccgaaaagtgttcgccaatattcaaaaggcgattcagtaccttttgtcagcgaacttaggggaagtcttaaccttgttcgtgatgacgatgttgggctggcaaatcttggcaccagtgcatatcttatggatcaacttagtgaccgacaccttgccagcaattgccttaggcgttgaaccaactgaaaagaacattatgcaacataaaccgcgcgggagaaattctaatttcttctcaggtggggtcttcagcagtattatttatcaagggctactggaaggtggcattacgttgctcgtgtactggttagctttgacgtatccggttcacgcaacggcctcattagctcatgctgatgcgttaacgatggctttcgcgacccttggcttgattcagttgttccacgcgtttaattccaaatctattcatgaatcgttgtttacggtcggcttgttccgaaacaagttctttaattgggcgattctagttgcatttgtgatgctggcgatgacaatcgtcgttcccggtctgaatgggttattccacgtgagtcacttggatgcttaccaatggggaatcgtggccttagcttccttatcgatggtcgtgattgttgaatttgttaagttcttccaacgtcgacacatgcggcgcgcataacccacccattaggggtaaaataaggctaactaatttaaagaaaagagtttgtacatgaaaaaagcaacgattcaaacgtatatgccagtactgtctaaagttatcgaaagtactgaaaaaatgggggaagaattaaacccatcttttgaaaaactacgtcaggccattgataatgacgcagttgccaaaatggttccagctgaattcaatgatattcagatggaatttagcgatggtactgaacagtatcaacaaaatttggcacagttgaaaaaagttgcggtacccgcacggttaatggggcggcatcgtaatttgttagcagcatacgaagcctacacgaatgcgtgtgcggccatgacggctagcatgaacatcgacgatcaaacgattgatgtggctgcttttaatcaggctgaaacggatcaagagactgaaatgggccgcgtttcaaataacgtgcaacggatcatgaatacagtcatgtaggagcgctaatctgggtgattggatttagcacactaataaaacgctcggtaacgtttatgcgttgccgagcgttttattgttggttgcggggcagccaactgtgcggccgcgccgtgctcgtttagcctaatgggctggttttttccagctcacaaccaatgtgtgaacagtatcggtaatggcttcgattggtagtgacagtcaacgacaattttcagatggtcattcggcgcggaaaccggagtaaaacgcgtataatataatgtaatgagattaaaagattgggtgaaataatggataatcagattttaacgttagttgatcaaacgctgacgaagtttaaaccgcaacagatcaaagcggttctcggactcatggacgaaggcaacaccgttccgtttatcgcacggtatcgaaaggaacgtaccggtaatttagatgaagttgaaattcgcgaaattaaagataactatgatcggcttgcgagtctagagagtcgtaaggcagatgtgatgaagttgatcgctgaacaagatcacttgacgccggctttaaagcaagccattgaaaaagctgacaagttgcaagatgtcgaagatttgtacttaccgtacaaacagaagcgacgtacgaaggcaacgattgcgaaagatgctggactggagccgttagcagcttggttattacgttttccggcaagtggtattcaggaacacgcggcgcagtttgtgaacgaagcgcaggacatcacagacgcgaataccgcgttagctggagctcacgaaatcttggctgaggcctttggtgataatgccggtttacgaaactgggtccggaattatacgcgtgaccggggcttgctagtcgcaaaagtgaaacccaagggtaaagcagccgatgaacaaggtgtttaccaacagtattatgattttaatagtcccatcaagcagatggtaccgtaccgggtactggctatcaaccgtggggaagccgaaaaagtattgaaagtcagcattgatgttgatcgtgctggaattgaccggtattgtcattttcgctttattggtcagcaccacggcccagcgattgaactagtagaagctgcttatcaggatgcctacaaacgctttattggcccagccatcgaacgtgaacttcgcaacgaattgagtgcggctgccaatgaacaggccatcaaagtctttggcgataatttgtaccacttattaatgcaggcaccattaaagggtcgcgtggtattagggttcgatcctgcttaccggacggggtgtaaattagccgtgatggacgcgaatggtaagttcttagataaacttgtgatttatccacacaaaccagctccaactgccaaacgggaagctgctacgggtgagtttaaaacctttttagagaagtatcatgttgaaatgattgcgattggtaacgggacggcttcccgcgaatccgaggagtttgtggcacaggtattgaagactatgacccgaccggtttattatgtcatcgttaacgaagccggggcttccgtgtactctgctagtgctaaggcgcgtgctgaatttcctgagctacacgttgaacaacgtagtgcgatcagtatcggccggcgactacaagacccactggcagaattgatcaaaatcgatccgaagtcagtgggagtggggcaataccagcacgatgtgccccagaaggaattgacaacgcagctggatacggtgattgagaccgcggttaaccaagttggggtcaatttgaataccgctagttcggagctattgacgcatatttcggggctatccagcacgattgcccaaaatgtgattacttatcgggatgaaaatggcgaattcacgagccgaccacaattgaaaaaagtgccgcggttgggaccgaaagcttatgaacaagcggtcggcttcctgcgaatcattgacggcaagaatgtttttgataacacggatattcatccagaaagttatcccgcagccaaagcgttattggcagcggctggattgaagacgacggacgttgggacgactaaagcccaacagttgaatcaattagatttagcgcaacttgcgaccagcaccggtgtcggtgaactgaccttaaaggatattattagtagtttgcaaaagcccgggcgtgatgttcgtgatacgatgcccgcaccgttactccggcaagacgttttaaagatgagtgatctaaaaccagggatgcagttgcaaggaaccgtccgcaacgtggtcgactttggggcgtttgtggatattggtgtcaagcaagatggcctcgtacatgtctccaaactaacggataagttcttgaaagatccgcgtcaggcggtggcagttggcgacatcgtaacggtgtgggtcgaagaagttgatgaacagcggcagcgcatcgctttgacgatgattgcaccggctgaagcataatgactgatttagagttacagcagctcgttgcgaccatttccatgcgtgattttcaccgtccgttccagcaccgcgcttattttaatgctcggttacgaacgacgggtggtcgttatcagttggcctcgcatgatattgatatcaatccgaagatgctgactgattttgatgaggccaccttgattggcgtcatcaagcatgaattgtgccattatcatttacatttgactaagcggggatatcggcatcgtgatgcagactttaaacgattactcgcgcaaatgggtggctcgcgctatgcaccagcgccgaagcaggcgacggcccggccgtatcggtatatttatgaatgccaacggtgtggccggcggtattaccgcaagcgccgcatggacactcgccgctatacgtgtggtcgttgtcaggggccaattaaattagtctgaaaaggtttgctaaagtggtacgcttccgatagaattagcttaactattgatatggagggattaagatggaaacgattaaaattggtgtggtcggactaggcacagtcgggaccggcgttgtaaaaatgcttcaagcgcatcaggaaaagatttcagaaattaccggtcgtaagttggaactagcctgcgtagttgtccacaacttgaaaaagcacgaacaagttgatttgggggacgttcagatgaccgaccaaatcgcgaccctgcttgatgatccgtccattcaaattatggtcgaagtgatgggttcaattcatccggcgaaggaatatattacgcaagccttgcaagctggcaaacacgtggtgacggccaataaggacttgattgcgcaatatggccgggagttggttcagattgctcgtgaaaatcatcgcgacttattctatgaagctagtgttgctggtgggattccaattttacggacgattgataatagtttcgccgctgaccggattcaacgggtcatgggaatcgtcaacgggaccactaattacatcatgacgcagatgctgactaagcattggtcgtatgatcaagccttgagctcagcacaagacttggggtttgccgaaagtgatcccactaatgatgtcgaaggccttgatgcggcgttcaagatgattattttaacgcagtttgcctttgggatgagtctttccctcgaccacgttcaagttcagggaattacgaaaatcagcccagaggatattgcggaagctcatcagcttgggtatacgattaaattactcgggattgcggaagaaattgacgatcgcattgcggtatcagtcgggcctgtgctcgtttctgatcaacatccacttgccacggtacaaaatgagaataatgctgtaatggtaacgggaacggctgtggggaacacgatgttttacggtcccggcgctggagaactcccgaccgccaacagtgtgctgagtgatattacaacggttgcgaaaaatattgcgttgaatacgactggtaacacgtttaactcttatcgccaggagacagtcttagcaacgcctgaagatgttgtgtatcctcactttattgccttgaagatgcgtgatgtgccggggatgatgatgaaattgacggcgattatgacccgcgcagaagtttcatttagtcgaatcattcaaaatcaattaggtgacggcaacgctcgtgttgtgatcattacccatgccatgaatgatcaacagttagcagatatcactcgtgaaatcggtgaacaagagaatatgcaactattagcgagttataaagttttaaagaatgcgtaggtgaggacatgttaacgatttcggttccggcgacttccgctaatcttggtcccggttttgattcaatcggtctggcgctggacatgcaactaacgctacaagtgttgcaacctagtgaccattggcagattgaccatccctttggggcggatgtgccgacggatgaacgcaacttaattattaaaacggcgttgcatttggtaccagatttacaaccacagcatttacagatggcttcaaaaatcccgttagcgcgcggattgggtagtagctcgacggccatcgtagccggcttagtgctggcaaacgaattgaccggcgcaacgcgctcttctgctgagctactggaagttgccactcaactggagggtcatccagataacgttgcaccagccctattaggaggcttggttgtggcgacgaacactgatggacgcgtccgtgcggtgaagttaccgttaccgatgctttttgcaagtgtctacgtgcctaacgaaccgctattgacgaccgccagtcgccaagccttgccaactgaattggcgtaccaccaagccgttactggtagtagtgtggcaaatacgttagtggctgctctagcaactcaaaattgggacgtggcgttaccgctgctagaacaggaccagttccatgaacagtatcgggctaagttagtgccggcactacaaacggttagagaccatgcccatgctctgggattaacggggacttatttgagtggtgctgggccgacggtgattactttgggtgattacggtcaactcgctacgttgcaggcacaattgagccaagatacaacactcaccggccaattattcttattgccaatggatgcaactggtgtaaaagtacaaaaatcttaaaataagcttgtcagactcgcaaaattttgttatgatattttttgtgagttgtgatgcggccatggcggaattggcagacgcgcaagattaaggatcttgtcggggttaacccggtggaagttcgaatcttcttggccgcattttttatacagaatagccggtattgatgcgattaatcgttgatataccggcttttcttttatacatgatagtgaataatacggaataaaacggaacaaaaacgatactattttgacaaaagcgataccagaaacgataccagattttgattattgagccagtattttactcatatcgtagacctgtgcagacagttcctgttgggatagatgagcataaatattgagcgtaattttaatatcactatgacccatttgcatttgtagtgctttgacgttgatattatttgcaacttgaattgatgcaaatgtgtgacgtaacccgtggactgtgattgtgggtaagtccgtttcacctatcaaggcctcgagccaatggttgggtgtcatcactgacatgatttggcctttcttgttggtaaagataaggtctttcgctcgtgggatgactactaacgacttgcgatactgtttaagtcggtcgacagttgatcgatcaagcgagagcgttcgataggcatttctggttttaggcgttgatattatctggtggttatcaattgaacgggagatagttttattaatagttaccagcccattcttcaaatcaatatcagaccatgttaacgcaagtgcttcacctttccgcatacctgtagtagcaagtaaataaaacagtgcactacggtcataccgtggttgtgttctgtgtccgtcggtagcatcgacaactgatagaaatgtagccaattgctcagcagtccaaaaattatcagctgctttatcctttgaatagtcaacggaaacttttggaacgtcaactaatttcattgggttattagtaataacacccattttttgagctgtccggaaaactagtgctgcatattgggctagcttattgaattgcttaacgctctcacgccactttaaagcttcttcttggcacttttgccatgtaatcgtattaatcctcatgccaccgaaagaaggcgttatatggtgcttaaagatgccctcaacgcgattcaaagtactctcttttacgcctagcttgtaagtctttagccatacttcgtaaacttcatcgaaagtaggattatccataatagcagccggattgtttttacgatgatcaaattcaactttggcacgatcaaatgctaacttagcagccttactactactaaaacccccatggtgataggttttagttttggtgttaccgttaatatcagtatactttccaaggtagccacgaacgtcatacacacgtttactaccaatcattttatgtgtaattttcattttattttttcctccatattgactatgcgaggggccaaattattggaaaaaatattgcacgcaacaccacctttcagtaaaatagagtatataaaaggagtacataactaatgtattctgacgcaagcacatcccaaactttggacggttgggggatgtgcttttttactactctaattcctgattaaccattggcttgatgtctgaaatgatagtgttttcgtatttaaaccacgcaaagccattccgatccttaccttgctgttcgatagggacattatggaaaaaatcatagcagcaaatagcagctctcgacaaagtatgttctttcccacagcaacatagaacatgatttttcttatcaatcacagtaactttgatacttgagtcttctttaaacgttagttgcgcgccagcggggatactgagatattggaatgttctgtttggccttgatcctattttgcgcttggatacaatatatgttttcccagtgattaatgaattatacttttctggtcggattaattcagcattcgaatcattaaaaatcagtagctcaaattcggcttttacttggttatatgtggctttgaaaaattctttagaactactttcacgtttgtcggataaagatctatgcaagatgcgttctgctttcttatagttgtttagaaaggcagcaaatagtagtaaagtaggctttccatctggaatacccgtgttgttaaattgcaaaagccgttgctttaaatttttagtttgaccaacttttatatatccaggaaaagacttgttctccaaagcatatacaaaaccataatcttcatttgacaattcgacacttcctcttgtttttctgtagctcacatgtgcggggggcttaacgattccagattaactgattgtaagatcttagttgattctgaacatagggatgtgttaaataatcatcttacgatagtaaccgtacttttagaccatgatgagacatactgtgcaatatgcccaattctattatggtaaagatcatcgtatcctgtagcgccaatgattgtaaaagcaacatttttagtgttagacatggcaactaattttcttttggttactccatagattattgaatgaaaggcatggtcaacatcattattgatagcaatttttgtacattcttttaggtaaaattctgaaaggctttgaatagttggcccttccacggaatcttgttgattacgttggattttaggcgttgattcattaataacatgaataaagtacaatgatttatggagtgcattagcaatttttatggcgtaatcggtcaccttgaaggcactagcagaattatcgattgcaacaagtattacgttaccattcttcatttttaagacccccttcaatgtattctaacggcaaaacacgtgacagatgtcggatttacatgtaggcaaaataaaacattatcatttttatttaaaggatcaggcttttttgaactttagcctgaaataattttcatcaattttgaataactcagataagttggaatttttattgaaaatgacttcataatgattaatttgattatttccattaatactatgaaatgataagtgggctctgtaagaatttgcttgtgctgggtcttcataaataatatatttccaaaaactacggtctggataagttttcctgattgttctgtttaaagtcaattctattgggataatcttttccatgaatggtggcctccattgggtaatcaatagtgcaagtatgtgagatggaaactattagaagtaaggctgagacaaaatatttgtcgcacagctttaacattggatttgagaggtgaacaagcagctatttttgttccaggcgcataattaagtcatgtttcagtccttctaacatacgattatattcattgctagaatagctatcctttgatagatggagaatggcgttcgatcttacaaaggttgttaagtcactagcaatattttctattagttcgtatttcgaaatatctttgttcataagtatgccttctttcgtttttttacgcgagcggcaggagtcgaacctgcatatcagcctaagaaagaatgggcttcaagacttgggctttgttctaccgttgaactatgctcgcataatccatatccccaactttggtcggttgaggggatatggttctttaattacttagatgtaatagttagaccggttacgactatcatgaataaagttatttgttgaagttgattgtagtttgattatcaatggcatagtaattcccactatcttcgattagttcagcagagacaaacttatactgattcattttcttgatgtcctcttttccagcaatagcctgtataagcccagttttttttgtgcctggttgaatcttatcgccgaccaattcatctattgctccgtgattagatgaaagctggttacctgatggggtgattaattcaactccgtttgaagaaacacgctttttactattatttttaagagagtatcccagttgatattcatagtaagtattgttaagttttttgccaaaattattttcatcattagcacgttgtgatttcttcgttgtttcaatttttaataatttggcttctttaaaataataagtagccgatttggtgtttattgccttattatgataatttttaatagctaacagtgtaatttttccagtttcactattttttgtgtatgttccaactttttttaatggccccgatactttctgtgagtgggacgagcttttattagaattgtttccacaaccagccagaccgattccgataaataaaactgcccctagtgtcgctatctttttaacattcatttacatatcctccaatgatataataatatttgtatatcaatatcattggttacgacgtctcactgtttgcggcagtggggcgatttttttatttaaaacattaattcgtagaatttatctggtagaccataggccatttgtatttcattaaagctttgtggtcggtcgccatactgttctttgtatagggcggtaagttcactacatgcaaataaattagcttcacgttccattttgccttcccaattatttccaatggtgtagagagcggcgcaggacgtgtgatctaatccatgcttcaattcgtgagccatgaccacatatttttctggtacttcttgcaattcatctgacaagccaatgtacacatcaccgctgcttgcggtcgtacatatccctttgaggttgcctaaactagcatattcaacacgataacctaaactgtctgcaatgacaaaaggatcgaaagttcctaatttatcggctaattgatgaacttgtagatacagtttataactgttcatcaacaacacctactttttattatcgtcattccgatgcttttgtttatcttcccagaacacaccttccaagaaggcacgtaccttaatttttgtttcgtcgtccatatccatgccttggaaacccattggtacatttgatttgagccactcatcaaggtcgattttatcgtcctcagttgcccaggagggagcttcgacctcgtttccaagcaaataatcaattgacacattaaagtaattggccactttttggactttatctatcccaggtgattttttcttccaggtatagaagtagttttcaccaaatccaagttcagtagcgacttgctttaaactttttccatgttttttcgataattcttttacgcgttcaaacattgttatatcaaccatccttcacaacgaacgattaatactttaccccaaagtataaaaaccgtttgacaaaattatactatcgggttatattaatatccgtaagctaattcaataaccaaacaagcaatcaaaaagagtgccaaacacgcggtgaattaaacgttccctaacgattaatttacgataaacgccggtgcaatggcttatttaactatgacttgattgtacactataggataaaaaaagacaagcacattattataagtatcctaaacagttattgaactggcttacatatttacatctaaaaggagatgaattaaatgccaacaacattagcagggcgagagcttatcaagaagtatattgatgatcgtgaaattagcattacaagcttggccaccacgtttggtgtaggaaagatgtacatgacgcaagtattggctggaaccaagaagtctgcagcggcgaacgagctagttttgaagattattgagacttttaaaattcgaccacatgaaggggatgaataaacgatgacggaaaaattagttctaagaaaacaacatcttaatggcaataatggaaccaagccaatattcgttgatgtctcaattcttgattccattcgtgaaattaaagaagaaaccggaatcccgatgagaagaattgttgaacagtttttatgttatgcaatgaagaatgttcagattattgatgaggaggaaggtgattagtaatggatggtgtcacattgaatttaccaagtgagtccttagcaccaatcaagcaagaacttactcgtctaattacggatgtgttcaagcaaatagctcaacgcgaagccttaccttattggatgaagaaacaggaggctcagatttacatgaatgttagtgacaagactttagataagttcattgtcgacgggctaaaagtttccattattgacggcactcaacggatttctaaaaaatctgccgatgagtattacgaagatcacgaattataaatagtctatgcgaggggccatttattggaggtaattaataatgattgaagtagcactgattacatgggcgctaacagcattatggtttaagcggcatgaaattattagttggtttggaatttaaaggaggaaacgaaaatgagtaaagagactgtagaaattaatggtgttaagttcgaggttgacatggacaccgctaagcggattgacacttttaaagttggtgacaatgttcggttgttggacaagcggtatagttcatcggaaatttacactggtgtgattcttggattttataactttaaagaattgccgactattcaagttgcttattttaaagatagcttcagtggtgcaaccattgattttgtgaatatcaattccaaaagtgatgacttcgagttactaccatcaaacaagtacgaagcagactttgaccgagacactgtagtaggttcactcaatcagcaaattgaatcaaagacggccgaagtgaagtctttagaggcaaagaaagcctggtttctaaaatattatggtaaatactttgtgaatgatagcgaggaagatgcaagtgaggaaggttaataataagccgtttgaagaatggcaagcaaaacaaaatccccgtaaccgggcgcaaccagtgacagggacaaggttaaagaataatcaaataattttacaggtttatggcacaccacgggcgaacctatggcaacaactgaaagggacatttacacatgaataattacaaatcacaagcaaagcattggtatcgaaagttaatgaagacaccagctgggtatgtatgtttagctacttaccggttcaaacagtggcaacattacaagagcttggcacggcaaacgtcattggatcatttacgaggtgaagaccatgcggacattcaaccagaaaacaattagtccaggtatggcttactgtgagtgtcttggatatcggtacttctatgaagactcgacccagtttctagcatggctaatgggtgtgctaagccctgaagcggtattagataaaattggtgttcaagaaaaggtgcgtgaataaagtgataccaggatatgatgaatggctagagcctccggaagatgatgagcggtctactaaggaagaattaattgaattaggtgtgattggagatgatgaagaatgaacttatacgaaatggcgacaaactatcgcgacttaaccaaccgtgatgacctggacccagacactgttgttgatacgctcgatgcattgacggattcaatgaatgtgaagatcgataacattgctagctggattgatgaaaaccaggcgaatattgatttcttggataaaaaaatgaaatcgttccgtgaagaaaagcaacgtttaaagaacttgaacggccggctaaaccattacgtcgcggacacgcttgatcaagccgaaattaagaaattaaccacggaccaacacattgtttcagttcgaaattatcgtgcgtccaccgtggtgagtgaaccggataaactcacagctgactacgttaaagaagttcatgaataccagccagacaaaacggcaatctacaaagcgttatcagctggcaagaacgtgcccggcgcccatctggaaccgaatcggaaggcagttattaagtaatgttccagctaagagattaccagcaagaatcagttgacgcggtctataactcaaccattcacggtcatcattcaatcgtagttcaatcgccaccaagaactggaaagactgtaatcatggccgatattgcacgcagagcgactgctaaaggtaaccaggtactatttatcgttcaccgccgagaaatactggaacaagccgagagtacgtttaaacaagacgacgttaacatgtccctttgcaagatgggtatggttcagaccattacccggcatattgatgagttaaataaaccagccatcatcatgattgatgaagctcatcatgcactgtcgaagtcctaccagagaataattcaagcgttccctgacgcgcttaaattgctattcactgcgacaccatggcgtatggatggcaaaggactgaacgtaattgctgatgacattgtactaggcaaaccaattagtgaattgattacacaaggtttccttgcaccggtcgactactatgccccgtcagaaattgatgtaacacagcttaaaactaagcgtaatggcgagtttgacgaaaaaagtattgatcaggccgttaagccaaaaatctatggcaacgcggttcgccattacttgaaactggcccccggtaagcaggctattgcctatgcttacaacgttgcgagcgccgaacgactggcggatgcgttcaaacaagctgggataactgctcgggcagtatcaggtaagacagatagggcgactcgaaagcggattgtatctgattatcgtgctggcaagattcaagtggtcaccaatgcggagttattcacggaagggttagacctacccaatgttgattgtgtaatcatgctacggccaacacagtcactatcactttacttgcagtttgccatgcgatcaatgaatccgcgtgaaggtaagcgggccatcattattgatcacgttaacaacgttgagcgattcggtttaccaaccatagaccggcaatggattcttggtggtcgggacaaacattcaaagagtagcaacgggacacctatcaagtcagtttcggtttgtccggagtgcttcgcaaccttttaccgcaagggcgaaagctgcccgttctgcggggccgagctaggcgaagaaaaggttattgagaccgatgaatctatcaagcttaaaaagattgaagctaacaagcggttggcattagccaaagagattgcagagaacaatgctgctaaagcagtagctgataagtcgccgagtgagttaaccacgtacgcggagattaaggcatacgcaaaactgcataattttaaaccgggttgggcatacttccaagccaagatgaaaggattgattagaaagtgagtattttaccaaagaatgaaccccataagcccgctggaaccccacgaaacttctttatctggggcgccacgatgagcggtaagagttacctagctgaacatttcccaaatgtattagtcttgaatactgatggaaatagcgccatgggaacacgtccaagcattcaattacgaaacgtgcgcaaccctgatggcagcttgaagagtagtgtcattgaccagcttcaagaagtgatcttggagttaggaactaccaaaaacacgtacgagactgtgacgctggatgttatcgatgacgtctgccagctgattgaacaggcaatttgcctaaaagcgggggtcgaatcgttagcagacatggggtatggccgaggatatgcattgttcaatactgtgcttcaaagtctggtaatggatctcaaggcattaccaatcaacgtcgtttacattagtcgtgagaatgactttacagatgatgatggtaataccaagacagttccgtcactcaaaactaagtattacaacgtggtcaacgggaattgtgacttagttatccatactcaacacgttggcaagaactatttacgaaacgtgacagaaattcgtcgccggtataaagcaagtgaaattaatgattcaaagattctcagtattttaaaagctattccgaatgcattagcaccggaagcgcaaacaacgaaagtaggtaaataaatatgagtttattagatattgcagcaaacactttagataactttgatccaaagaatgattcagtgaacagcggaagcacaggattaccagatggtgattacttaaccgctgtggaaagcattgaacatcgatcattcgattcaggttgggattgcttacaggtcgtgtttacggttcttgatggcgaccatgctggcgaaaaagagtacgaccgtattagttttgctactaagaataaagcaggtaaagctatcccagatttcattctcagtcggaatattaagttcgtcatcaagctaggttcgctattgggcgtggagatgaaaccagaatactttgccagtgagaatgaaactgacacacacgaaatgctggctaatgtattagcaccagaaaagggcaagtcggtaattttacacgttaagcaccgtccaaacaagaaggatcccgacaacccctacgttgaatatgacttagatgcaactgaacagcctgaaactgcagacatcacggatgcagacttacctggcgacttaggtggggcaccactaccaactgacgcagacgcaccagcagaaccaacagatgaagcaccgttctaaataaatactgcagtgccagtaaaccatcgttcgggtgtgatgcccgttaatttacagaaggaggccggtcatgcgtaatttagttaattatgcagttagatacgccaaagcggggttcagcgtcctgccaatgattggcaagaaaccgatgattaagttcgctgaccagcccgccttgaccgttgatcagatacaaagctattggcgatcacacccgtacgcacaattagcgctacggacaactaatttttttgtagttgatattgacgaacactctaatggtgcggatggttttcaatcgttcaaagactatgagcacccagagtatttccgtgaaacgttatcgcagaagacagcgggcggcggccggcaactattttatctaaagcgtgaagatagcactgttcagcagaatatcggatggctaccgggaattgatattaaggctcacgttaacaattatgtgatggtcgcacccagtgagcggaatggtaaggcgtatcaatgggagaatcgcaatccgattgctacgggcacagcagagttagtagcagccatcaatgccaagacagctacggcagaagtagaccttagcgggttgaaaactgattattcaaaaaagtctggcaccgctgagctgtttgaaacagttgtggccgggcttggagataccggtggccgtaataatgcactggcaagtttcgccggtggattattattccgaggtgttgatccgcgagcagttatccagctaggcttgctggcaaatgcaaacacggacgattcactgactcagcgagaagccaagacaacgattgagtcgatgattaagaaagaaattagacgaagggaggctaaccagtgagcgcagaggaagaagcagacaagctacgcaagttagaggaacagcagaaagttgtaccgcttaaaaatcaaattaattttatggaaacggctaagggcggtattaaagcaaattcacttgaaaatgtttgtctgatattagagcacgatccactgcttaaaggcaagttcgcgtataacgaatttagttacgaaactgagttcatggaagattcagccgagctaatgttggaacatggaccactgcaagatgagttcacaccagcagtacaacggtacatcgaacgtaagtataaagtcatgtttacgccaaagttaattgatgcggcagttaccgaagtgtcacgacgtaacgtattcaatccagttattaattatctgaacgaatgttacaaaaaatgggacggcgttactagggtggctgacttcttgccggtctatctcggcgttgaaaaatcaccagttacaacattacagaccaagctattctttgtcggcgcagtagccaaagtattcaagccagaaactaaatttgattttgttttggatttagttggtggtcaaggaactggtaagaccaccttgcttaagcgtatgtcaaatggctggtataccgaccaattcaccgactttgaaaacaaagacaactatggcaatatgatgcgggcttggatcgtgaacgacgatgaaatgaccgccaccagccatagtagctttgaaatcttaaagaaatttatcagtgctgaaattctggagtaccgaccggcctatggtcgctataccgtccggcgatacaaaaacttcgtcatggcccgaacgaccaatgaagtgacttatctgaaggataaaaccggtgaacggcgctttatgccagtgatggtcaattcagcactacagaagaagtcaccgattactgacttgccgcaggaaacgattgatcaattgtggggtgagttcgcaagttactatcgcgacggttttcgattcggattaacgcaggatcaggagcagatgatggcggataaccgcgagcaatttatgtacatcgacgccgaagaggacgctatcgaagaggcattggcgacgattaaagacgactttgtaatgagtaaagacatcgcgtttaagatggatggggccgacattacgaagaatcggaagttggcgaagaaaatcaagtacgtgatggacaatcacaaaggttggaaaccggcacaacaccgagttaacggggttccacgccgcgggtacacaagagtgtagtacgtgtagttcaggtgtagtcactttactgactacggctaaacccttggggcccaacgtatacagtaacatgtagttactccttcttatattatatatatatatattatttttatatagggtatagggattaggggatacggtgagtatgaggttgagaaagttaaaaattactagctacgatgctacaccttgaacaaagtcaatggtagcaaggggtacagcgtatcagtagattggaagtgtagcgactacatgcgagaacaagaaattcagaatcaaattcgggtggccgtgtcagcagccggatgcacaattttccgggcgaatgtcggcaaggtcgaaatgaagaacggtcggtggttcgatactggactgccccaaggattcccagatttatttgggttccgacattcggatggttcgatattcttcattgaatgtaaaaacgaaaccggacgaccgcgggctgatcagattaaatttcataaatttttgatgaaacaacacacgattcacgggattgcacggagcccggaagatgcattgaaaattattaatgaggggctggttggatatgggttttcaaaacggtaagacgtaccgagacttatttattgaagttaacgagcgatatggaattcaaactagtacatcgctacacgttgatttagacaaagtgttaagcgatgagaaataccaagaatgtttaaaagcttattcagttctaccggcaatatttgccgacacctttggaggtaataataatgattgatatgaaaattgaccagtatcatctgactagtgacaaatacgaagttaaggttaacaggatgtcattagacagccatgggcatccggtaactagctacgatgaaaagtctggtattaatcggctggtagaagtaaccctagcacactgtaagaacgtcgaggacgcattgcactggcttcgtgggtatttaatccggaatggcagtgaacacattaaaacagtggatcagttagccagaaagagtcatgaaattgaacgacagtttgacacgtacattaaagagcgcgtaccggaaggattgtaagttatgcctaagcacactaagaagcgttcaacaattaaacggaaacaccggcgtatgaagcaacacgccgaagcaaacaaagctaaagcacaggataacaagcaactggtcaaggaatatgagccgtacaacattcgcaagcgggcgtttgaagtgttcggggaggattgaaaatgaagattaaaacttttagacaaccctgggaggaagacgacgaggaatttgatagtcgtgtgaattattttatcgaagataaacaagttgttcagattacaaccaatgaaactgttagtgatactcttcgtttaacgcattcactgaccgtactttacaaggagggtaatgaatgaaaactttgaaagtagcgaaccactggtttaatgatagcggtgatgttgagattgccttgctagtgccacttgataaaagcagagagctttggaatgatttattctggtatgacggtaataatcgaccgttatggccacgtgggactgaacttactgacaaagacgtcttggaaactcactgttataagcaacgtaaaatgtcatcaattgatgacatacctagtgactgttttatgtccatgacttaggaggaagaaaaatgaagttctatcgcaaacagccaattgaggccgaacagttcgatggtagtcagacaagtctatttggctatgaagttattccagactcattgcttgatgcattaacaggtgagccagcttattattcaatactgattgacgattttgagcccgaacctaatgactttccagatgataatgaagtatcgtttgaaattggtgattggattgttaatgaagcagacgagattaaagttatggctgatgaagagttcaaacaacagtatgccgagttaccggtgattcctaaaaacgttgctgaacgcattataaccgggcacagccttaatgacttaattcctactttgggcggaatttacagagctatgatccaaacagttgtttatggatatcagaaaggcgatattggcgactggattgtcaatcatagtgatgtttttgcccgggcgtggctagacggatatgtggtggaggaagaaaaatgactgacaccgaatacgcaaaagcaatcaaaatcttacaatagagcatgtattttgacaataataaataatgccaccatgatgattgcaggttaaaattatgcgatagctagaatgaaggcgaggcacagactatggaacgtattgatcatgaaaagcttaacaacctggtatgtaaagttgaagaccgccatgaaaatggcattcttggcgcaaacgaaaaagaaatggcacccatttggaagataaccaaggcaacaatgaagagcgactatttagcagtttcattgcgacaatacaatttaattgaagcatacgcagccaagagctcacatacaacagaggaaaagaaccaaaccttaaagcaactgcataagaaatacagttggttaaaccggcgggtgacggagtaccgtcacggcaatttaattattcggagttgaggtggaaagtggtgggcgattttgaaactaacaagaaatttttaaggcgttaccggccttactttagacaaatcaagcggcttgaaactaagctatttgttattgatgatcgtattgagtcaacacattcacctagtatgactggacaaccaggtggcggtaagcggcgagagctagctgacgatttaattcagcgagaagagattgagggacggattaatcggctgatcaagaaaagccgtccaatcaaagccgagataactgattgtcttgatgaattaactaattcgttagaagcttctatattagagcagtactttattgaagatattcagctggatacgattgcactacagatgagttattcgttccgtcaggtcaaacgactatacggtgatggagtacgccatgtgaaagttttataaaaagaaagtcgtcacaattatgtggcgattttttgttatgattgaagcagaacaaatcctcggaggtactaatatatgagtaattcagacgtagtacaaagactcttagaagagcttaataaccaaaatcagatttatataacaattataactgttattcttacgattttaggactcggtttttcattgtttagttttatgcaatggcgattttctgaaaggcagattaaaaaaatagagacagattttaaaaaggactttaaaatatcagaaatacatgaagcattgcaagattttgaattaaaaaacaagcaattagaacaggctattaaagatgcaaaatcggctgaaaaattgatgcttgaacggttgcatgagctgcaaaactatgacttagagggtaaaacaaatttattaacaccagtagtttcgaatggtgatatagtacaatcagcaaatagtattaagacggttaaccgggcattaaaaccgattatcaaagataatgttctactaccagatacgtatcagcaggttatgacggatatcagtaatatgctttacattattgttaaaaacaagtttcctggtaacaatgattttaatggggctttgtcaaggctgattaaaacagtgaatgaatattatgagcataatattcaaaatattcagaatacaaatttgaaaatagcagatagcataatagaaagtaaaaaatatatagaaaataaacacaaagagtatttagatcagaaagcaaagcatgatgtcccctagatgtcactaaaatgtcccctaaatgtcacttacatgccgaatgaatgggtgtatatttgtattatcgaatagttccaaagagaaagttgttgcaattatgtagcgacttttttggtataatcgtactatcaacatgaatataggggtgtcgtttatgactgcgatgaatgcaatgattggatccgatagtattattttatcaatggacacgctagtttctacatacgatgaagatggtaatattataccgaattatttcactaaaaaatttgagtatatgccatttgctaaatctgttatttgtggtacagggagttctgacgttattgaggctgctattaatatttcaaggagaatgcttgtccgtgaagttgatgctttagcgaagatgctatcagagtgtttatttggacttgacgaggatgagtatcatattagtgatgcccatacgagcacaatttacatttatggttttactgaagatggaaccgtaaatgcttatgcgctaagaagcacaaaaaagtttgagtgcgaattaattgctgattccgataatcccaagacattaattaagccaaactttggtgaagaatttttagataaagcgaataaagcgcttgaacaagatgattactttatggcgtttagggacgttatgcgcatcgagaaagagtatgataatcaagccggtaaacataaggtcggaattggcggtgaaaacacttgtctaataatcgctaaagattcgaatgatgcaataattaaaaagatagatacttttgatgattattctgatcagtatcaatttgctcttgataaaacacatgaaaatttatgatacaaataataataaagcgtcatgccaaacggtgtggcgttttttgatgccatcatttctgggagaaggatagcttctgggatgtaaaaatactcgaacaccaattggttccgactagttggtgagcgcaggctacagttagtggtttatggtagcactatccaagtgtgctgtggcggaataggtagacgcatagtcagacgcgagtaacgggtatcgggtgacactgatatgaccacacgtcatgtaaggtgcaaatccttatcggcatattaattaaatttattggaggtaatacgaatggaacaatctgagttcaatgcaacacagacaatcaatgagacttgctatagcttaattaagcagggctattcattgcgtgacatctatagtggattgggtaatgtgatggctggtattgaacctaagcatctaaccaaccaagcgttggtgattgatttggatatcgacacatccaaggtagttggtaagttacgtcatgtcatggacaactgaacaatgccacgcattctatggttcggttgagtgggaacatctgcgcgctgctatccttaagcgtgatcactatgaatgtgtgtggtgtaggcgtgatggtaaggtcactcgttacggcgacgtggatagtcatggtcgtccggttgtactggaagttgaccacatcaaagagttggctgactatccggaactgcgaaccgagccgactaacctgcggacactgtgcaaggattgccacaacaaacgacatcatcgcatgaactatcgaagcaaacatgagcgtaaagagaaccgatggtcaaaggatgagaggtgggattaatggtggaacataatataacttggtcaataagcaacaggcaaaagatacctaagatctatgttgatgatgagcaggctcaggtagtgtcgtgtagttatcagtttgtaacggctacagatattgatgagtcaggagttagcatgatgactgcaactatcatcttgttatcggagcgtgactataagccaattcaacatgtggtctttatcaatcaacagactggtaaagtgttctatcaatagacaaggagtgatgactaatgcgatcaagaaccgataacactaagcaagtcgtggtctacgtagtcatgcgtgaccaacaagcgaatgtgctttttgcacatcgcgtttattttagtgaacgaagagcgaagaactattgtaaacggatgaataatgcaaaagaatttactggatattactacattaataaagcaatcttttttgactggaaatcttttattgccaaggcccccggggtccaaaaaattggcgaaaaatagaaaactgggaaccggtgggtaggactcgactccggaaaaatattgctttttttattcaatttgaaaggggggtgggggtttggaccaccgtaagataagaagggaattgatgcagcgaatcaataaaaaatcagctgttgagaaagagaaggttgaccgatatatcagccttttgaacgctttttataagcttgatgaagccattattgccaatggtgtgatggtcaaaatcgagaatggcaaacagacatattggaaagcaaatccggctgtttccgaaaaaaatcgaattaattccgcgctaataacgcttgaaaaggactttaagcccgttaaaaccacccctaaagcgtctaaaacagctactacgagcgacgaaaagggtggcttggtatgattcaacagaagtatgttaaaagttacctacaggcctataaagacggttctatcaggttgaataagcggcgaataaaactcgtggaattaatagaaaagaccgttctaactaacgaaaattattattttgatgaagaaaaaatcgaggactgtttaacgttcgctgataagtggtttttcccatttacaccctgggaaaagttcttaaccgcgttcgtttttttatatgatcacaccactgagcggcgagcaattcggaagttcatggtagtcgttggccgtggagctggtaagaacggctgggtatcggtgatttcatcttttcttttatcacgactgcatggggtccgcaattataatggttccattatcgccaatagtgaagaacaggccaaaacatcggttgatgagattcacgatgcggtcgacttgcatagtgagttgaaaggcgaattttatgcgaccaattcgcaagttcattcgaagtctaccaactcgacgctacgataccggacttctaacgggaatactaaagatggcttgcgtgatggttttgttattttcgatgaaatccacgcctatcccaataaccaaaatgtcaaagttcatatttctgggcttgggaaagttcgagactcacgagttttcgagattgggtccaagggctatgtacgtgatggctacctagataaagaattagcaaaagctgatgcgattttagacggcaaggcccccattgaatcgatgtttccatttgtttgcgagttggacaacttgaaagagatggacgacccagccaactgggagcttgctaacccatcattttctaagccgatgaatggttacgccaaagacgtttaccaggagactatggacgactataacgacctggaactagacccgtccggttatgatgagttcgttattaagcgcatgaactaccaggttgaagacctagaaaagtcggttgccccttatgagcaaattaaagcaaccaataagccgattcctgatgatttagatggcatggaagcgatcggctccgttgacttcgcgtctattcgcgactttactgcagatggtttgactatcaagcgagatggtaagcaatactttatcagccatcaatttgcccgccgccaatttgtcgataagttctatgcatattcagctaagccacaagaccgcccccagtctgctcctcctattgctgaatgggaagaacgcgggttactgactgtggttgacacaccaaccattgacccgcaagcagtcgtggattggttcttagagcagcggaaacgtttcatcattaagaaagttgtcatggataatttccgggcggatttacttcgtaagttctttgaagatgcaggctttgaggtggtcgtgattcggaatccaactgcgattgatggattactagccccgagaattgaaaccgggtttgctaatcatcaatatatctggggtgacaccccgttattgcggtggaacactcaaaatgtgttggtttcgaccgatagccacggtaacaaacgatacggcaagaaagaagaaattcggcgaaaaactgatggctttaaagcgtttgaatatggccaatatctggttgaccagttacccgactactcggtaaatgaatcgctagatatgttggccgacattgatttctaacggaagggaggtgaatatatgagtgtaattaatagcttctttgacctgtttacgcggcgaaaagattccagctttgtttatgatcttgatttgttccaggacattaagaaccgagcctacttaaagcgcatggcgattgacacagtgatcaattacgtaggccgggcggttagccagtcggagtttcgtgtgatgaacaaggggttacctgttaaagatgcgatgtattacaagctcaatgtccgaccaaatactgacgaatcggccagtgatttttggcagcattttatctaccaattgatttattacaatgaggtactagtgattcaagacgacgatggcgatttattaattgctgatgactttagtcgtcacgagtatgcagtatatgaagatgttttcgataatgttacagtcaaagaatacacgtttaagcgttccttcccgatgtctgatgttatttacctgagatactcaaatgatcagttagagcactatttgaccggtttatggggagactacggtgagttatttggccgaatgtatgagctggaacttcgtaataatcaaattcgagcgaccgttaaggctgacttaacggctggtgttaatgacggtaaagccaacaagctgcagaagtttatcgacaagattttccaatcgttcagcaagaactctgttgcactagtaccaatcacaaatggctttgaatataacgaagtatcgaacggggtaggcaaaaatcagacgtttgatgaaagtaacggcgtgttactggcattcattgaccatgttgcccggctggtgggagtaccaccggcgttaattcatggtgaaactgctgaaactgctgaaaatcaaaaactgttcaataagcagtgcttgagttcgttattaactaagattcagtcagagctaaacgctaagtcattcagccagcgagattacttaaagaatggcaaacaagttgaagtaattggtattaatcgaccaacactaattgaactagcagaacaaatcgacaagcttggttcgtcaggtatggttactcaaaacgaggttcggtcagcagttgggctgccaccacgtgaagacggtgaccagatagtgatgaccaagaattatacaacgaaaggtggtgagaataatgaagaagattaacgttaagggtccgattattagtaacgatgacaagtggatttatgacatgttggaaatggacagtaccgctcctaaggatgttattgatgcattaccagatgatggttcagatatcgaagttgatattaattccggcggtggtttagtaactgctggaagtgaaatttatacagcactgatgaattactccggtaaggtcacggtcaacattatgggcatggctgcaagtgccgcgtccgtgatcgcaatggccggtaatccaacacgaattagtccggttggccaaattatgatccataactctgcggctggagtttatggtgattatcgtgatcaggacaaattgtcggacatgttaaaacaactcaatgaagcgatggccaatgcttatcaattgaaaacgaagttaccgatggacgacttgttggctaagatggactctgaaacctacttgaatgccgatcaagcaaaggagcttggattcgtagacgaagttatgtttactgatgataagattcaattggtagcggatggtggttctgggctattgccgcaaacggcgattgataagattgccgagttagtcaagccagctcctgatttatctgatactgatattgaccgtatttcaaacgcggtcgtacaaaaattaaatattcaacccacaaagcaagcggaaaacaaatttgttgatccgtttgctttttaatttacgaaagaaggaaaaaaaaatgattaaatttgatcccaaaacttttactaatttttcaactaagcggaaggcttatgcagaattgatgaagaatagcacggatgccgataaacaagcacagggctttactgatatgatggacgcgcttggtgaagataccatggctgaaatcaagaaccaagtccacttacagacggatgatgtgctgaacgctcaacgtaaagatccatcaatgacgggtgatgaagttaagttctttaacgctttaacggccggtgacttatcccacactgaaaagaccgaagtaacattaccagaaacgacagtagaccaaatctttgaagacttagttgatcaacatccattcttgcaaactattaagttacaaacgactggtttacggttgaagtttttaaagaccgatgaaacaggcggtaaggctgtttggggtaaagttttcgatgaaatcaaaggtcaattaacagctaagtttgatgatcaaacggctactcaatccaagctgacggcgtttgtggcattgccaaacgatatcttagaatttggtgcagcttggatcaagcaattcgtgatggctcaaattaccgaagcatttgctgcagccctcgaatcagcattcttagttggtgacggtaacgataaaccaatcggtttgatttctgacttatccaaggggaccgttagcggtgacacgactacttatgctcaaaaggcgtctgttggttcaattactttaaaagacaccgaaactgctaagaaggaattagctggtattgtcaagaagttatcagttaaggaaaatggtaagccatacgttgccaagggtaagacggtcttagtcgttaccccagggatttcgttggacatggaagctgccatgacgatgcaaaacgtcaatggccaatgggtactggcttatccatttggaatccaaattgttgaatctcaatacgtaccaaatggtaagctgattgcctttgttcctgatcgttacgatgcgtatgtggctggtgctgtaaacatcaagaagttcactgaaactttggctatggaagacggcacactgtacactgctaagcaatttgcatatggcaagggcaaagataacaacgtcgctttcgtttatgacttagcgttggaaacagctaccactactgatacggcgggaaaataactaccccggacaccggggtaactaagcctaccgcgaacagtaccgtagctgaaatcactgcttggttagatgctaacggaatcgaccacactggagctacgttgaaggccgatttactagcattagtggggtgattaaatggcagatgaaaagatgaatccattattagatcgattcaaactgcgtatgaagatttatcacaaagctgaggacgcaaatttatcgcgaattctgaatgcaagtcagaagcgtatcaccgatattactggtattgccagtaacgccggtgatgatgtgtatgacgagctagttttagaacgagcacgatacgcttacaatgaccaagtcgagttttttgacgctaattttttggacgacttattgtctgcgtccttgaccagctatgaaccgggagatgatgaagatgaatcgaccgaagtttgagtacaatgcacccccaataagaacgaatcagcttaatacgccggttcgtttttttcgtaccgtcaaaaatttggggccagagccggggcgtggtcaaactgaacaagtttttgagtgtttgggtttagcttatgatccatccaccaaagaccgtgaagtgcttaacgttaatgaagcaaagtatggcgtgactatcaagattcgcgatacttttggcgaatttgacccgacaactaaggacaccgtggttattgacgaccgccggtatctggatgccactggtcaaccgattgtttgggatgttatccaggtggcgccggacctagaaaataatgcttttgtaaaaattgtgctgggggtgactaaatgacggaagtaacggttaagttcacaggcgttgatgaagtcatcaacaagctgtcccagaaactgagtccagcaaaactgaatcgtgctgaaaacgatgcgctacgagtggctggtaggcgtgtagcagttgagttaaagaatgcggtcgccagctatcgtgacacaggtcaaacagttcttcaagtatcagtcggtaaccctcatagtcggggcggtgtacggacgattaagattggttggcatgcgggatctcgctggcgattagtccatctgaatgagctcggatatacacggttcagcaaaacctatcatccacgaggcatgggtaaagttcaaggtgcatttgatagtagccgtggccctgccaaggcacttgaagaagctgaattgaggaaactactatgaccgaaaccaaggatatgcttgcaactatttataccgcgttgttggcaaatgcaacaattgcaaaactgacattggctggtgatggcagtcatcgaattagttattttgaaagcccagaaacggctgaccacgacaatctatttgttgtgattacacctgtcgggccaccggtaccagcggctgttggcagtgatgattatttgaatgtgcaattcacgtttcaagtcaatgttgaatctatcagtcgaccggcacgtaatgctgtggcacgtgaaattcaaaacgaaatgcttgctttgggcttttcaagattagctggtgctcagaacgaattagatgaattcatgactgaaactaaccgctttgttgatgttcgcagataccgcggtaacactaaattgtatgacacaaattattaaggagagatgtaattatgtttgtaggatataaacgattaaagattcaaccatttgccgaagacggcacgaaaaaaggtgacctgattattgttgaaggtcaggcacacaaaggggctacgaccactgctgaaatcagtggcttagctaaagacccagtgaaagtaccggggtctaatatcgattactacttgtcacgtcaaggcttgggtgacaccagggtagcactcggtattttagatttaccggaagttagtgctgacctattggctgggttccgtgtcgatgatgacaagatcagctatggtggtgaagatacgttgccaccatattgctcaattgaaatggaatccaaagaagacactggcgaaattgcgttagttggtttcttcaagggaacatttacgcgggataagattagcttgagcacgctggattcatctaaatcatttacaccagaagctgatgcctggacttttacgccaattagttcgattgccacagctactaacggcgaagtgatgcagaagtttgtgggcgatgccactaaggatgcgacgactgttacgaagtttgaaaagcaattgtttgatccagcaggtagcgatacaaatccaagtaatggataattctgaaaaacatattgaataactaaccactagtcgccgataaatcaacaataccaattggggcggcttttgtgtgtatggagggaaaagactatgagtacaccactaaagatggaattacttattgatggtaaaaagcagaccttcacggaatcgttcattccggcaggccgtatcttggacgcattggacttaatcgaaaccgataactcagatcgtaaattgcgtgatgtttttgaagaacgagtagcatttctagccaaagtatttactgatccattggtaacgacggatgcaatttggaatggattcaatgcgattgattttgatgaccgtactttcacaattatctgcaaagtagctggtgtaaacccaaaaaagctacagatggcgacgacaccggaataaccatcaaagaagcccgcaaaagagtattatcagcagtcggcgcaattgttgaaaaccgcaccggctacacactttcgagcgtattaaatgatgttgattttcaattgttgtcgcaaataatcgaagcaacgactgaacagactcagcagactgaaagtgggacccgagttaaaccggggactgtgggggtaaaccctggtaatcagcctgtcatgagtctttttgactttgctagaaaatcttaatgaagggaggaataataaatggcagatgaagtattaggccgcatggtcatcgagttagggctggatcacgctgcgtttggtaaagggttaaccggtgctaaacgtgaagttaagtatgcaatggctgagatgaaatcatcaatggccgtactcggtcaatcgggccgccggtttgacgtcctatcagctaagtctaaaggcttgtcacaagtaatgatgagtcagcagcgggttgttgaaaaactgggtaaagcgtacaaggattcgctggtcgatggtaaaccaaccgcgcaaacagctaagctagcaactcaattgcagaatgccaatgctaaattagcctcattacaaactcagtacaagaataatgcagcggcaatggctaaagcacgcgttgagcaaactggttttaccggtggcttaaataaagttagcaaggccgctgtagcgactggtacatcgatgaagaacatcggctcaacgatgacccgcaaagttagcgccccaattgcggctggtttagccattgcaactaaatccgctatcacttttgattcgcaaatcaagtccatggggcctctgctgactaatgggggcgcagttaccgctaagtaccggtcacagttggatcagttaggtgatgcatctaaaaaaatgtcgatgaagtacggtgtctcgactactgaaatcaacaacggcatggcagagcttattcggcgtggctataccactaaccaagttctaggctcaatgccgtctatcttagacgctaccatggcttccggtgaagatatgggtacggtcatgaatgccacagcgtcaatcgttgaacagttcgggttaaagactaactcaacggctgggacgatgaagaacactcagcaggttaccgattcgctgacatacgcggccaatgcgactgcggctggcttcggtgatatgtctgatgcgatgagctacgtcgggccggttgcctctagtttgggtctcagtgttgaacaaactgcagcggctgttggtgagcttagtaaccaaggaattgaaggccaaaaagctgggactaatttacgtggtatgctgactagtttgattaagccaaccaagcaaaacaccgaaggattcaagagtatgggcattagttcgaagcaactggcccatgactcacacgatttaccgcaactaattgatgatatcacacatggcactaagggctggtcaaacgctgaacgtggtaaggccttagcccaagcattcggacgtgagaaccaagctgctgctaacgcattagttaaggccggttctaagagcatgcgtgacttgactaaagatactgagaacgctggtggtgcgactaagaaagttgccgagcaaatgagcaatacttcggcaaataatgtcaagaaactgattgcgtcattaaaagtgctaggaattgaaatcggtgagaagttaattccaaaactaacaccgttagttaagaaagccacggatatggttcaaggcttctcgaagatggatgatgccactcagaatacaattattaagtttgccctattagctgctgctggtggcccagtattgagtatgctgggtaatatcgtcggtggatttggaacatttggtggcggtattgttaaagttattagcgctaccgcacaatggcacgcgaagaatcaagcagctaaagaatcactcgcgatgttaaaaggtgcgactgatgccactagtggcggtttcaaagcattcaagggaagtgttgatactgtaaatggctcggcatcaacggctaagtcaacgttcggcgtgcttaaaggtgcctttacgacggccgaagctggcgccggtgtattgggaacctcattaagtgtgacgggtgcggcggtgaccggtgttggtttggcagctgtagccggtgtggcttactggcaactctatggtaaggaagcggcagctagcgctgcacgaacacggcagtggggttcagatgtcggtgaacaggctgattccgcactgactaaatttaaaggatttagcactagcgcgggtacgtctttgactgactttgaaacagctagtcaaactagcacgaagaaggttgctaaagacttcagtgatatgtatacggagatggagaaggattccaaagacactatccagcagatgcagaaggatatgaagggcctacccgactctgttcaagatgacttaaaagaagatatcgctgatcgcaagaagcataatgctacagtattggccgatgctaaggaaaattacaataacgcggaagctatactcaagaaccacaacggtaagatgtctggcttgagtgatacggaacgaactgcattgctcaatagccaacgtaaaatgaatagcgatgaaattagcctactaaaaattggtggaagtgctaagaagaacgttctagctgcattgaatggggatattggtaacatgacccgtaagcaacgtgatacgaccattaatcaattgacgtcttcaatgcagaaagaaaataagctttacaatgatcagagccagcagatcaagtccatgtacgataaaggtgaaatttctgcatcacaatatggcaaggcaatgactgacctgcaagctacccacaagtcaaccacagatggtatggccgcggcaatctataaactggataaggcgaacggggcttcgaaagcccaaatcacgcaggatttactaaatgttggctacacttacaagcaagcagcggcgattgtaaaacggcaaaatgatgacatgagtaagagtacatccttggtggttgctgaaactggcaacatgagtaagaagtctaaggcggcagctgatacctggaatagcttagtatttgattccaagactggaaaagttaagaccaatgcgcaggcagaagtcaataaggccgctaagtcgaaagacaaatggaatcagatgaaactactggttaaacagggaaagatgagttctaatgccgcggccatggttggggttgcggctgttcagaccaaacgctgggatggtttaacgcttaaagagaaacaggcgatgattaagtctaaaggtggcgatgatctagccgggttaatcgaaaagggcaaacaatggggcaagtttaccccagccgaaaagaaggccatcattacttccaaaggcggaccagaactcttaggcgtcatgactaaggctcaaacttggaataagttaacgatggctgagaagcgggcagtcttaaaggacaacgcgtcgccagccatgaagcaagctacggttggtattaaagattggaacaatttaacgccacaaatgaagacggtcatggccaaagctaagggtgccgaagatgtggctaaaggcgttaggaatgtcaaagactggaacagcttacccacgtctgaaaagaaattaattgcaaacgacaagggcgctacgagaattattaagaaggtaactggtaattataaggcttatcagaatttaccaaaaaacgctactaagaatttatttgctaaggacaatgctagcaagaatgctggtaaagctaaaatttcagttgataggtttggccgagttaaggtaactggtaaggtacttaaggctactgataaggcgtctggtcctgccaagagcggtaaaaagggactagataaatttaattcaaccaaaatgcagaccaaaactgcaaaaggtaaggattcggcctcaggttcaatgaacggtgcacgtaaatcggcaatgaaatataacggcgttaatatggcactcaaaactgctcgtggacatgacgctgcatctagtccaattaacggtgctcaccggtcgcttgatcgatataacggggtaggtatgcgcggaaaaaccgctcgcggatatgattcggcaagcggtgctatgggacgcgctaaaggttcgttaggtcgctacaacggaaccggtatgcgagacaagactgctcgtggtcacgatggcgcttctggtccaatcagtagcgcaatccgtactctaagccactggaatgcaatggggaacgtgactcacttcattacaactgtttttcgtaaaattactcggcacgcaacaggtacaacaggtaccgatggtaatccaatcattgttaatgacgaagaaagttcagtattccgtgaagctgtcaagtatcccgggcatccagcgtttattccacacggacgtaatgtctatctgaatgcaccaaaaggaacgcaagttatcccggctggcttaactgctaagatgtttggtgtttcacagtatgcgggtggtactattccggctaactcatcaatcatacaagcttcgaaagcaatcaacgactcaattggcggagataataccacaatcaactataacttgggtggtagcgacagtacacaagcaatcgtagcaggcctggaagcaatcttggataagcttgatgaccaacaaccaacatttgaagtgcacaacgatatgattggtgaaaagctgcggactttgattaaacaaaaggattcacgggaacacaatttaaatcgattcttctcacaaggaggttagcaaatggatgctttaattacaaacttaaatggaactgaacataagttgagtgacttcggcttccaagtgctcaacttcgaagaatcggcgccaacaatcaccagaactactaagagttttgatgggcgcgccggttcattagattatgggggccggcatgtcgttaagaggattacaatcaatggtttgtattgggttaaaagcctggaacaagcggatgacgtgcgagataaagttaacacggctttatcacaaacggaccccgtttatttaacgcgcgtttacggcggtcgaaacttgtatgacgtgcgtgagagtggcaaagactttgtgatgccagcacaaactgttgataagaaacggtttaaagtgtatcgaacagataccaacctaccatcaattatcgaacggactggtaagggtgtttactacacctggtcactggaatttgagacagtcgaattgccatatggtgagagtaagccacggtcgcaaacgttagttagtggccaatcaataacttataacggtacagtagcttgttcacagctagaacaggctttttattttgtcgtgacggctaaggtggcgtctgctggtgggtttacgttgacagtcgatggtcaatcattgatagttactagcccagtagttgctggtgacgtttatacgttatcgggcatgaataatactcgtggcaatcagaacattaatgataaaaccaatgcggggtattttatcctgcatcccggtgcagctaacaagatagtatgttcaatcagtgcggacattcagatcaagaatttgtgtgatttatatatttaggaaggtgaggtgaaaattattgattaagttttatgattcaggtggaacggttcatttcggccaagcaaccatcacgagaaagactagcgtcaacggcgggttgtcgttaactggtgaagtttttgccggtgatgatgtattgaacggtttagactacggttggtggttgaatttcgataatgaaaagtacgttattacgtataaaaagttaagtgatgataccaataccatcgttttcgatgcagtgcaacagtttttttgggattttgccaaagtagtattgcattcacaatacacgggtagccatgagtattcattttatttaggacaactctttgataaatccgggtatacctacaagaatgacgttgccgtgccagcatttgaaaaagaaaattggggttataaaaataagctagacttatttaacgacattattgatcaggctgatgttgaatttgaagtgcacaatgagacagttcacattgctaagcaaattggtagcgacctaaccagtttcgttcgcaaaggaattaatcttagtgatctcacagaagaaatgaaaatatcagactttgcgacgtatgctaggggctatggtgctttcaaagatgatcaagatcaaagtaaaggtcgattagaagttgagtatcgcagtgagttagccaagcagtttggtgacttagaaatggatccgattgtcgataagcgatacacaatcgcagataacttgattgccgccttaaaaaagcgggttgatgcgacatataccgtgtcaatgactatgaacatctatgacttagaaaacgctggttatccgaactatgaagcgcctaaagtcggagattggattctagcgattgatgaagcattaaatttcaagcgtaaaatcagaattattcaacttgaagaacaatttgacgtgactggtaagcatatcgggtacacggccacttgtggtgatttgaatatcgtggatcagtacacacatctacaaattagtttggataataaggtacaacagattcaagaggccgttgacgctgcagcgataagtgcaaatggtaagaatacgaattactatggtgcaaaagaacccgtgagtgccaatgaaggtgacttatggtttgaccaaagtaatagtgatccggacaaatggtctatcaaacaatgggtaaacggtcgttgggaacagattacgttaaaccctggcgaggtagacgccaaagttaacgttgctaagcaagaagctgaaactgcggtcgaaaatgctaaaagtgcatcagataaaactgatcagcttgcggccaagtatgatgatacgaattcactggctagtcaagcaatgggtaaagctgtaagtgcccaaggtgatgctagttccgcagttgccacagcaaattctacagctgcggagttcggtaaagttgaccaaaaagctgataatgctgtagctagtgcactgaatgctcaaagtggcgctagtgatgcagttaaacaggcttcttctgctgccgctgattctaaagatgccaagcaaattgccggagcggttagtcagagttataagactttaactgacggttcaactatgactatcgccgagttagagagtggcctagctgctaagttgactaaaagtgacttggacggatattccacccagacgtggactcaaaatcagattaaaatgacggctgatggaatcaacggtaccatgtccagtatcaagagtactgtcgatggtcagactaccagcattaatgacctaaaggctgactcaagtttttttaagagccagtttacgactgttaacaatactctcggtaagcagactactgatattggttctttacaagctacgtctaaagaattgactactggattcaatacactaacaagtgacaatacgactaataagaacgacatcagtcaattgaagcagactgctacgaaggtcagcagcaccttagaaactgttcagacacaagttcaaaacagtgctgtcgggactaacttgttattaaattcagacaagcaatttacaaatagtagggttggccaagaatttgtcgcgaccacatttaatcttaatgatatttttgacaaatatggtactgatcaagtttatacgatcagctacgatttatcgtcaaaagaccccagcaaagttaactggatacaagcgtacacttatcccggtacaacgccacaaaacaagtattcgttccctgcggtaaggcaccaagggataacaacaacgccacaacggtttagcatgacttttaaacctaagttatttgataagacaattcctaggacaaccttagttttttacggtcaatacgactctggtaatatcccaattgtaaatcatgttaaggtagaaaaaggcagtctatctactgattggtgccctaatccagctgataatgctacagttactgctttatccaagctttctcaaactgttgacggtatgaaacttgatatttccaagaaaattgagcagaaggatctcaacggatacgctactaaagcgtgggcacaaaatcagattaatgccactgctgatggaattaacgcaacattatcaagtgtcaaaaagactgttaacgggcataatactagtattaatgacttaaaggcggactcgagctcatttaagagtcggtttacaacggttaataatactcttggtaagcaatctaccgatattggcacacttcaagcaactagcaagtctttgagtgctaactttgattcgctaagttctgacaataaaacaaacaagcataatattggccaattgcaagcgagtgctacgaaatttaatagcactttaatgacagttcagcaacaagtgacggatagtgctgtggggactaatctagcttacggtactgatcaggaatatgcaatgggctatggaatccctactacgtcatgggaagatggctatgcttttgaaacattgcctcttgcgtctggtgctggtgaaattctcccacaagatccgcacaccttttactataccctgactaaagggacaacttatactcaaacagtatggtttgagactgatgcaactgtcaaagacttgagtgcagctcaaattacatggtttaccaatgcagggcatgattttcaaccggcaagagttaaaaagctaggccaaaatagctataaggttgcatcaacatacacgtggccgggtaagagtggtaatagtgtacgactgtttgatattgaatatttaaattccgcttttgatctaagcacaggaacgtatttgaagttcggcaagctcaagttggaaaaaggcagtttatctactgattggtgccgtaatcctgctgataatgcaactgttgacgcagtttcaagtatttctcaaagtgtggattccattcaaacaaccgtacgtggaaaagtagataataacacgtaccagtcaaagatgacacaattagataagcagataacttctgttgtcggacaagttaatagcttgggtcaaaagaaccttatcgttaactctcaattccaatacgattggcaaaactcttggagtatatctagccatgattgggcaaactggtacacttctaacttcacttgggcatggcttaatggctaccaaggtatttgcgcaaatatacctcaaagccaatctgaaagctggccacatattcaatcatctgatgttgcggttcctgaccctggtgtgactgcatactcagcaagtgtttacgtcaatattgactgggttgagacgtattgtgttcttgatatgtcattttacaatgcagctggcgttagaacatttcatgatacaacggcctctaataagggcctgaactttttaaagctagagaacattgtttcccctaaggacgctgtacgtgttcatatagaactacatgtccatgatcacgggcatgcagcatttattgagccaatgtttgttcaggacagtagtgttggtaagtatattccggataatgcaagttggactgaagttcaacaaacatataacagcatcaatcttaaggtttccaaagatggtgttataaatgcagtcaacatttctcctgaaggaatccagatatacggtaacaaactgcatattacggcggccacctacattgataatgcagtcattaaggacgccatgattgccaacctaaatgctaataagttaacagctggatcaattaatgcggctaatatcaatgtgtataacattaatggcgcaaatattgttggtaactcaataactgctgataaattgcaagcagggtccatgcttattgcgatgaactcaaccttgcaaacacttaaggttggtactgatggactatacactactaacactagtggaacatttatcggtaagattcatgctaataatctaattgaacatcccggagattgggggctgcacttcgacctgtcatctaatgcacagtacatggcatggggcgcccaaaatgaaggggatccgaatggtggatacgtcgtcaaatttggctggacccgtaatagctcggctggtgacttcactatgccttggggtgggttctggttcaacgataatgttatgttgcacaaaaatttaagatttaacggtggtggcatcgacgttgatggtgcataccaactaatgaagtttgcatggattagtatgaatggaattaaatatccgttctttggatcaagcaatttaaaggctggatggctattcggaagctatgaaacctatttggttagagacggtggcatcattaacgcttcgaagatacttggtgtattaaatggccaacactataaatttataaaagatctcaactctaacgggactgtcaaaggttatgttgatgttaaattctagtaaaaaataagaaggagtaatatattatgaaaacaactattagttttaagaatcgtgaactcgcaggcatcgctaacacactaggacaatttaaattaaaaggtaaggcaagcttaggacgtagtactcttattcgtaaacttgccaataagcaagaagagtacgttgctgatcgagtagaaattcagcaaaaatactttgaagctgatgaagagggtaatttaaagacactagacgatggtagtgaaaaattaattccaaaaccagaactagctgacgaaaaggatccttcgaaacttggaaaagatcctgaggctgatcttaactctgaaatgaacgagttatcagacgaccttgcaaatattgatttcagtgagtactcggctcgattcaaaggacttaaagcgtcattggacgactatccttatgaactggacaaggaagatgcgattgtgtacgagcgagtttatgaccaattagaacaggcgtttgcaaaagattctaaggaggaacaataatatgcaaattattaatcaaagtatccaatatcaaatggaaacatcaaccggaaatactgacagcgtggtagttggccttcatggtaagaccgacaaactagaatttagcgcaaacttgacaattgtggctgatgatttagaagctggaacaacgtttgatgacctttccaagaaacaactatccgctttagctactaagaagttaccaaaattgatgccaactttatcctactcaaactaccagttcttcgtccagaacgatgcgcctattcgtctgacggcgtactcagacctaagcaataatggcaattatatttcattaagctcaactctcgaccagtctgacttcacagataaagatatcgaatctgtcggttacgaagatgtaaaatctgcagtcaaaactattcttagtcaagaattcccaacatcataattattttatagagaggatgttggaagttgatgggaattagacgaaattattcaatattgatgacgggcgttgaaatcattatgattggcgctttttttgttaccaatacattccagtttgaccggcctgatttattaaataaccttgctagccacattgacgacccgccatttgcaaccatcaatattatcatcggaacggtcattgtcatggtagccatctttgatattcgaccgttgataaagtggtgctacgcggtggcggcttttatttggacgatttatggtttggcttttatgttgcagaacattgaagttatggggcaaccatttggccggttagactgctggttgatgtttgccattgctggccgtgtcattcttgaatcatgggcgggtgatgactagtgaactggacggtgattattcaatcggtactaacgtttgctggtggctttgcagctgcttactggtcatttaaaggcagtgttaagaaagctagctttagtaatgaaggaatttatgcagataagaccagtgacttgtttgagcgaatcgacaagcttaccaacgagcgtgacgatctgaaagaacaagttatgaagcttcaaggtgaggtcaaagatttgaccaaagcagtcaaagagatgaagcaagaaatgaaggagcgtgatatataatgatggaactaattcaattcattaacggtaccaccattgcggcaattgccgtagtgacgtatcttgttgtgtgggcaatcaagcaaagtaagcttagcaaccagtatttacctatcattgctattttaattggtgcagtgattggtatttttattggcattgccaatggcgatatcaaatgggtagctggtttggttgatggtgtgattgcaggtgccgtcagcgtcggtggtaatgagctagctaaatcgattgggacaatgtttaatggaggtgcaaaataatgagtttaaaaggatttgatgtagccagttatcaggctggtatgaatgtaggcgaagctgcaggcgactttgtgttggtgaaagcaaccgagggtattgattatactaatccagaatttaatggacacgcaaagcagactttgtcagcaggcaagaagctaggcgcgtaccactttatccggaacgattctgatattaagaagcaagccaattacttcttgaccaccgttaagccatatattggtaaagcaatgctggttcttgattttgaaaacacgacaggttcaaccattcagaaccaaacaggcgtcggcttagcgaagcaatggttagattacgtttatcaacaaactggtgtccgaccagtgctttatacggggattagttgtgagaactcattagattggtcatccgtggtcaaggccaactatgggttatggattgctcagtataacaactacaacgttgtgaatggctatcaaccacgagacttatatggtagcttgaagaactggaagacagcggtaatgttccaatatactagtactggacggttacctggttggtcaggtgatcttgatttcgatgtattctatggagacaaatcggcttgggataagtacgctaaggctactaaaatggtcacaaacaaatcgattgttcaaaaggcaacaaccaaagatggtgtgtggacaataaccaatgaagttgggacgtttagaccaaaccaaaaacttagtattttcaaatatcctggcctagaatcaactggtaagtattactacaaaggtgaatctgttaagtattttggctatgtaagtaatccgcaagccggctacatctatatcgcttatcgatacaacagcaagctaatttattatgttgcttgccgagaacttgccaccggtcgggcgcttggcacattcgaataaacactagattcccgcactggtctttgttgactggtacgggaatttttgtgttttgaatctaattattttaagctatgtaaacttggcccctcacaagagcgatactaaaagcgatactgagaaaatttaataggacctaaacacagtggtatcaaagggtttagacgttttactatgaaatcttcttggccgcactaacgaatataagaatcgatttcgataggttaggccttgaaggatcgattctttttttgttgcggtaaattggactggtcacgttattccaggcttgcttttttgccaactacttcaactatgttcaccaaatttgccgtaccttattgtttaatctcatgattaccagcattataatgaaaacggttaatctactgattacgatattaagagaaggcgaggaccaggcattgattagaatgagtagatggtggtggcgtatcttggtgggcggcttgctggttagtggcgtggtttaccccgcacaagcggccgtaacgacttatccgattacagggattcaggtggtgcagccgcgggtctatcagacgaatagtcagaacggtgtcggttaccatttaaccgtcgtgcgtcatcagcgtgcccaattgcgtgttaatttacatttaaagtatcaccagcatacacagtggacgcgtactgagcaagctgatatttatcgcaacgggcattaccaacgcttctactatgtgcataatggttatcagcagagcggctggatagctgctaatcagctaaaacccgccagtacggcgtcggttcaactgcgggtaccactgattgaccagctaccggagttgccaacggggtgtgagatgacagcgactaccatgatgctgcagtatgccggcgttaatattaataaggaacagtttgccagccacgtgccgcgcagttcgaatcctaacactggttttgttggtgatcctgcttcggcttacggtattggtctctacatctacccccaaggcttgttaccaacgatccgccactatctgccgtccgctgtagatctcagcggggtgggcctgcaacgacttaaagcacagctcgctaaacgtcatccggtagtcgcttgggttcagggactcgatggttttgcgagtcatacagtgacgctcactggatatacaacggcaactattaggtacaatgatccttggcgtggtcaatctggacagatgggtaaccaagcgtttgagacgatgtggcaattaaatggtcgtcgggcactgagctattaagaaattgataccatagttaacattagttactgtttcataattttatattaaaaatacgctatttgacacacaaaataatcgtttttaatactgtatcgtgctagtgtatcaactttgagcctgaaataagggcttttagctttagtgtattttggcacggaatttgcatatatataagtgagtgcgaaaaagattgcgcttacagtatcaaaaacataaatagttacaggcaatttagatattatttattcgttttatatgactgtaacgaaaaaataggaggtacaaagatggtaagcattatcattgctagtcacggcgaattcgctaaaggcatctatcaatctggatcaatgattttcggcgaacaagaaaacgttcaagccgttacgttgatgcctagcgaaggccctgacgacatcaaggctaagttggaaaaagccattgcttcattcgacgatcaagagcaagtcttattcttagtcgacctttggggcggtacaccattcaatcaagttaacggcttgtttgaagcacacaaggacaaatgggcaatcgttgccggtttgaacttgccaatgttaattgaagcgtatgcttcacgactttcaatggattcggcacacgaaattgccacgcatatcattgaaactgctaaggatggcgtgaaggttcgtcctgaagcattagcacctaaggaagaaaaggctgctgccgctgcaacgactaacaataacgctggtcggccaggaacgttaacatacggtttggcacggattgattcgcgactcttgcatggacaagttgccactgcttggagtaagacggttaacccgactcggatcattgttgcgtctgataacgttgctaaagacgaactgcggactaacatgatcaagcaagcagcgccttctggtgttaaagctcacgttattccaattgctcaaatgattaagattgctaaagacgacaagcactttggtggtcaaaaagcattggtcttattcgaaacgccacaagatgcgctacgtgcaatcgagggcggtgtaccaattaagacattgaacattgggtcaatggcccattcggctggtaaagttcaaccaaacaaggttttggcatttgatcaagatgatatcgacacttaccgtaaacttgaacaagatggcatcgaatttgatgttcggaaggttccaagtgatagtaaggaaaatatggataatattttgaacaaagctgaaaatatgttgaaggaacaaaaatagttccaagaatatcagaaaagatggaggattaaatcatgaatttgaacgtaattcaagtgattttagtcgtacttgtatcatttttagctggtatggaaggtattttggatgaattccacttccatcaaccagttgttgcatgtaccctaatcggattagtaaccggacaattggtcccatgtattatcttaggtgggagtttacaaatgattgccttaggttgggccaacattggtgccgccgttgcacctgatgctgcgttagcatcaattgcatctgcaattattttagttttaggtggtcaaggccgtgccggggtttcctcagctattgcgattgccgttcctttggccgttgctggtttacttttaacgatcattgctcgtacgttagcaactgggattgttcacatcatggaccgtgctgctgaagaaggtagctttagcaagattgacttctggcaatgggttgctatctgtatgcaaggacttcggattgcaattccagccgctttgattttagccgttggtgctacgccagtgaaagcaatgttaaatgctatgcctagttggttaactgatggtttatcaatcggtggtggtatggttgttgccgttggttatgcaatggttatcaatatgatggcttctcgtgaagtttggccattcttcgctttaggttttgttttagccgcaatcagtgaaattactttgattggtttaggtgcaattgggatttccttagccttaatgtacttggcactttccaagcaaggtaactctggtagcaacggcggtggcgctaatactggtgatccagttggcgacattatcgataagtattagagaaggaggcaaactgagatgtctgaaactacaaatattactaaaaaagtaacattaagtaaaagtgatcgtctgcatgtttggtggcgttcaacgttcctccaaggttcatggaactacgaacgtatgcaaaacggtggttgggcttattctttaattccagcaatcaagaaattatatacaactaaagaagaccgtgctgctgctttgaagcgtcacatggaattcttcaatacccatccatacgtggcttcaccagttattggtgttaccttagcgcttgaagaagaacgtgccaatggggcacctattgatgacgttacgattcaaggggttaaagttggtatgatgggacctttagccggtgttggggacccagtgttctggtacacggttaagcctatcgttggtgccttagctgcatcgttggctatttctggtagtattgttggaccaatcttatacttcgttgtttggaatgcaattcggatgggcttcatgtggtatactcaagaatttgggtacaaagccggttctaagattaccgacgatttatctggtggtattttacaagatattacccgtggcgcctccatgctggggatgtttatcttagcggcattgattgaacggtgggttaaggtggacttcagtccggttaaggtttcgaccattaagcaacaagctgggtcgtacattgattgggataaactaccaaagggtgcttctggtgttaaggaagccttaacacagcaagctgccggtcgttcacttgacaaatacaaggtaaccactttgcaagacaacttggatcaattaattccaggcttaatggccttgttattaaccttcctctgcatgtggttattaaagaagaaagtctcaccaatcgttatcattctaggcctcttcgtgtttggggttctgctgcacgttattggttggatgtaatacttgcttgtgtcatatttaaaggatggactcgtgggagctcatcctttttatttacaagcgtgctttgcataacatagagactcgccgtataatcggtatgagaatggatacgaggaggggttagtatggtgcaatcaattaatactaaggttgatttagttacgaacggcaattcgcacatgggattgactgattatggcaaaatcatggtcggtgataatggttttgaattttatgatgatcgcaatgttcgtaattttattcaaattccttggactgaggtgaaatatgtagttgtatccgtaatgtttggtggccgctggattccacggttctcttttcagacgaaacgtaatggtatgatcactttttcagctaaggaccctaaaaaagtgttacgggccgttcggcaatatattgagcctgatcgaattgtaaaatcactgacatttttccaagtccttgggagaatattcaagggtaaaggtaaaaaagataagtatttgaaataatgaccaatgctgtcgagggttctttgccgacggattggtgattatttaatagttagtttaagaagcttaagtatcaacgggtggggttagcgcgggttgatacttaagcttttttttgatgcatcaaaagcagtatccgagcacgttaaggtgcgtcataaatggaatttcaataccatgaaacagaaatagttgtactgacaagtcttaaaaagtaactgattcgggaactatggtagaatatagtgtgttatagtgtatcaaaacggatcagttatttgatagtggtgaaaaggagtggcgaagttgaccagaaaatccaagatttgtgaatacgtccgtcaacatagcgatcgacacggactgacgacggaaatggtagcgactgctttaatgatagcgcgttcaaacgtcagcaaggaattaaatgcactggtgcgagaaggccagttgcacaagctgacagggcggcctgtgcactatgttccggtgaatgcaacagccacaacggccacaacaactagtggcgtagcgaatggagcgacgacagagcgaataccgacagcgcccgtcgcgacgtctgtgcctaaaccggttgtaaatgatatatttgccagcatgattggctcgcatgagagccttgctaatcaagtggaacaggcgaaagcggccattctttacccaccgcggggattaaatacattaatcattggcccgactggttctggtaaaacttactttgcaaacgccatgtatcgttttgcggaaacccaacaagtcttaacgaacccgcaaggcctgattacgttcaattgtgccgattatgcgcataatccggaattattgatgtcgcatttgtttggttatgttaaggggtcttttacaggtgctaatgaagataaggacggtttgatccaagaagcggatgggggcatgttgttcctagatgaagtgcatcgtctaccaccagaaggtcaggaaatgattttttatttcatggatcacgggacttattcacgactcggtgagacggcgaagagtcaccatgccaatgtccgcttagtttgtgcaacgaccgaggacccagaaagtaccctactgcagacctttgttcggcgaattccgattacgattcagctaccagcgttcaatcatcgctcagccaaggaacgtttagaattactgaaggcattattgtcattggaagctaatcgaatcaataaacagattcggttaacggaggacgtggtgcaggccttacttggctcagtcacatttgggaacgtcggtcagttgaagtcgaacattcagctggtgtgtgcccagggttttgtcaatagcatcgaaaatgacagtgaaatcacaatcacgatggatgatttgccacaaaatatccgtagcggtctcatgacagtagcctctaaccgtcacgaactgggggccatctctgagttgttggacccggttctcatcgtgaagccaaatgatggtccaacgccgcttcgtaataagaacgataattatgaattaccatataatttatatgagattattggtgataaagcagcgttactccgacgggaaggccttgataaagaacacatcaatcgtttcatcacgaccgatatcaatgtgcatttaaaatcattttataaacaaaatcagttagaagtttcaccagaaaacaagttagccgagatcgttgatcaggacgtcattgattttaccaagacggcgcagatgacggttcaagacatgctaggttataatttcaaggataactttatttacgctgtgagcttgcacgtcagttcctttatcaaacgcatccaggcaggcaagcccatgcgtcaaatgagttcggatatgttagcgatggtgcgtgaatatccggctgaaatcaaagcagcggaggcgctcaagcaaggattagaggaacggtatcatttaccgattcccaagtccgaagtttattatctggccattttgctcatctcgttaaaatcgatgcagcttaacggcaaagttggcgtgctggtggcagcgcacgggatgagtaccgcgtcttccatggcacaggtcgtcggacaattgttagatgattatgatgttcaggctttcgacatgcctctcgatatggacccgagtgtcgcctatgatcatgtcaagcgacgagtagaaaagcttgattctgggaaaggaattttgttactagtcgatatggggtcgttaacgaccttcggggaacgaattcagcaggagacgggaattgcgacgcgaacgattgacatggtgaccacgccggttgttttggaagccgttcggaaggctagcctggtcgatagtgatctggattctatgtatcaggagctcgttggtttcaaaggttattcgcgaatttcacggaacctaccaacggatagtcagcgcgcaacagtcaagcccgccttagcgacggataagacggcacaacgggcgattattgcaatttgtgcgaccggcgttgggacggctgaacgtatcaagtcaattttagacagtttattagctcaaaactttatcgaaggtatcacggtattcccaatctcagtggtcgaaatgaagacacggatacaacaaatcagtcaaaattatcaaatcattgcggcaactgggattacaaaacccgaattagacgtcccttttatttcattggaagaattgctacaaggtggtggcgaaaagtttattgatcagttagcgacggggatcgattcgccacagaccatggcggaagaaagtcagcagttgacaccggaactctgcgaacggtacttaggcgattacttcacgtttttaaatcctaagaagttaacgggaattttatgggagtatagcgaagtgattgcgacgcacttggatggtgtaatgacgaatgcttttcgcattgatttgattatgcacttagcgggtgcgctagaacgaacggccatcaaagatgaaatttcggcacccaccgaagagatgccagacattatggcatcgaagtggtacccacttgtgcaacaggccaatcagcaattgacagatcaactacagttaaccttctcagatgctgaaaattattatattgtgcaattattggagactcatcaggcaaaggtcgcgatgagttgatacactaacttggcatgctttttgcatgtatcttattgagtagatttaaccgactgaggagggaaagtagatgttagcatttgtcgttgtcagtcatgggagttttgcgcagggcgttgtcgattcatcctacatgatctttggcaagcaagataaggtccaaacggttacctttcaactggacgaagaacctaatgaattagctgataaattagctgctgcggttgcccggtttgacgcggatgaccaagtcttattcttggttgacctatggggcggttcgccatttaacgccgctagtcggatcgttgccgaacatacagagcgcatgggtctgattaccggtctgaacctgccaatgctgattgaggcttacactgttcgtgataagccaattgatgaggtgattgcccaccttgaagagactggaaagattgggattaagcatctcaagttgttacaggacgatggggaagatgaaccgctatgacgatggatattcgtttagcacgcattgatagtcggctactccacgggcaagttgccacggtgtggaccaagacggtcagtcctaaccgtattttggtcgtctcagacgaagttgcccaggatgcacttcgcaagattctaattgtgcaagccgcgccccctggtgtgaaagctaatgtgattacagttgacaaaatgatcgagatttatcaagactcgctatttgatgaagtaaagccactaatcctaactgatacgccccagaacatggcgcgcttagtagcggggggacttgattttagcaaaacgggcattgatattggtagtctagctttttcagcgggcatggtgatggtcaccaatgctattgcaatcggtcaagccgaagcacgggcattatatgcgttacaagcagcgggattaaaggtgtttgcgcagaaagtcccgacggataaaagggttgatgtgatgccgctattagctaaaaatggctttatggcgccagataagtattaacaaagttatgatggacagtggtgtgtcggttatgggcaccactgttctttcattttggctaggtttctaaggatttaccaaaaatacagccgtaaactttgacggataggcttttattgataaaattaaactaatcgaaacggaaagtagcgggggtttaaaaatgccaacttatacaaaattaaccgccatgggacaatatgttccgggacgcgttgttgataatgacgaattagcagccattatggacactagcgacgaatggattcaggcgcatactgggattaaaacccgacactacgcgatgaatgatgaaaacacctcggatttagccgcccaggtcgcccagcagttactacaaaaaagtggtttagctgccagtgccattgatttgatcctagttacgacaattacgcccgatgccttaacacctgcgacggcttgtttagtgcaagctaatattggcgctgataatgcgtttgcgttcgacctgagtgcagcgtgtgctgggttcacgtttggcctagcaacggctgacaagtttattcgcagtgggcaataccaaaatgtgatggtgatcagtgcggaagttaattccaagatgatggactttcaagaccggacggcagccgtcttctttggggacggtgctggtggcgcgttattacaagctactgacaatccagatgaaaacagcttgatcgctgagaaattagaatcgcaaggaaacgctacggtcattcactctggacgagtacggccgattactgaagttgccgcaacgaactacccgcaaacggatgcgttttaccaagttggacgggatgtttttcaatttgccacgacggttgttccagaacagatgcgtgggttaattgcgagtgcgcaactgacacccagtgatttacaatacgtgatctgtcatcaagctaatttacggatcattgaaaaaattgcggctaacttggcgttaccaatgacgaagtttccacataatgttgatcattatggtaatacgtcctcagctggggtggcaatggccttagccaatgtttttgataccttaactgggccagtgttgttaacagcatttggtggcgggctagcgtatggctcagtcttgatcaagaagtaggagtgtgcagatggaattaaaagatttagatcgattagttgagaaatacgcgcgacagggttatcagcaaattcgcgttaaagccggcgacttggagattgaagtgacaaaaccagcgttagcttcagaaacggtaactcccgtagccgctacgcctgccagcacagttgcggagactgaagatgaagtcgttacactgccgagtccgatggtcggggtggtccacttggcaccagatttaaaggttggtcagtcactgacagctggtcaagaactaggccagattgagagtatgaaattattcaatccattagttagtccgaccgatgggacgttaacagcagtactagttgctgacgacgccactgttgagtacgaacaaccgttatttacaatgcgaaaggatcggtagctatgtttcgcaagctgttaatcgcgaatcgcggtgaaattgccgtacggattatcaaagcctgtcaacaattgaatattcagacggtcgccgtttgctcaactgctgatcggcatgcgggttacacacaattagcggatgaagtggtctgtatcggacctgcagctgccagtggatcgtatttaaatgccgaagcgattctaatggctgcaattaatacgcacgccgatgcgattcacccgggatatggttttttagctgaaaatgcggattttgccgccatgtgtgcggaatgtggcattgcctggattggcccgcagactgagcaaattaagttgatgggtgataaggcccgcgctaaggattttgcacggcaacaagccgttccggtactagcaggtcaatcattacagggcttagcatggccggatattaaacacgcggccgccaagatcggttttccactagttttgaaagccagttatggtggcggtggcaagggtattcgagtgcttaccgacgttcatgaactccatcaacaattgcgggctgcgcgtcaagaagctgctgcgtcctttttgaacgatgcgatgtatttagagcaatttctgacaactgcccgccacattgaagttcaagtcctcggcacggggacgaaattattcattcttggtgatcgtgactgtagcctccaattgcacaagcaaaaggttctcgaagaaagtccggcaagtattttgactgagacacaacgccggaccttatacgatctgtcccggcagttattagcgggtacacattatcaaagcttgggcacaattgaatacttatttgcggatggtcagttctatttcatggaaatgaatacgcgtttacaggttgaacacggggtgacagaattaaccaccggaattgatattgtggctgaacaaatcaaacaggcggctggcgtcacggttgattttccagagcatgttggcttgcagcccaagtgtacggcgatcgaagctcgattgaccgctaccttaccggttaagcagacgcggattgaaacgctgagctggccagccgatgtacgagtggatacggattatcatcagggcgatcggctagtaaccatgtatgatggtttaattgccaagttgatggtcaccggtgcgaaccgtcagcaagccgtgcgcaacttacaacgggccttagcgcaagtaacattgacaggacccacgacgaacttaacttttctacagcaaacggtggcccggccggcctacattcatgatcagtacacgattcacagtctagcacgttgggaggcgtcgaaatgagtcattatccagcttctgggacctggcaagcctgccctaagtgcggtcggcacgtccaccaacgccaatggggcacttatcagcaatgtccttattgtcactattggcaacgactgacgacggcgcaacgattagaacaactcgtcgacgaagggtcgtttcagccgttgacgatgactgagcggcctgtcaatcagctggggttcccggactatacgaacaaactgcggcgggcccaacgccagaccgggttaaacgaggctgttgtctgtggaacggccctgattgagcaacaaccctgtatcttagcagtgatggatagtcattttatgatggggacgttaaacacggcggtcacacgtcgcttattgcatgctagtgaacaagcgcgggcccaacggctaccactgatcattgtgaccgcctcaggtggtgctcggatgcaagaaggtgtttatgccttggtcggaatgaatttgattctggcagaattagcacggttagcagcaacgccgttacccttgatcacagtgctgacagatcccactatggggggcgtatcggcgagttttgcgtttaagggtgacctgattatcgcagaagcgggtgctaagattggctttgccggagcccgggtcatccaacaaactttgcctgtcaagctgccggcggattttcaaacggcggatcagctgtttaaaaatggcatggtggatgcagttgttgaacgacctcaattgcggtcaacgctaggacaagcattagcgaattatgggattgggaggtcagcccatggataaacgattacagcgattacgggcggctgatcggatcagtgcgccgactatcattcaagcgttattgccgacaatgacgcaacaacggggagaccgtttattaggtcaggatgcggctttaacggctggctttgggcgcactgccactggtcgccaattagctgttctgggcgttgaccggggtgttgatattgcgagccggcgtcgaaaaaacgggggagcattaactgttcccggctatcgcacggcgttaagagtcgtaacccatgcggctaaatttgggtggccggtcgttagcttaatcaatatgccaggtgctgatgcgagcccccaatcggaacgctatggtcagagtcaggccattgcggacttgattgcggcgactggtcagctgaccgtaccgaacgttgttgtatttctcggtgagggccatagcggtggggcgttagcctttgccaacgccaaccgcattatcatgctagatgatgcacttttcaacgttgcttctcccgaggcagtcaccgcgattttacatgggcaacagaccagcagtgacgccatcgatttattaccaatgacagctagcgctttgcagtcgcgcggcttagttgacctggttattgaccatcaggatcagacattagtcgctgcgatcaaccaggcgattgagacccaacttgctgcactagaagcattgccggcaccggatctaattgaacagcgcgaagcaaagtttcaacactttttacaatcttggccggtcaattaaaaataatcatcaaaaaatgggcttctcagaatttttattctgaagaaacccattttttaatagttgcttagtactgattagtcgtggtttgatcttgagtcgtggtctggtcctgcgtcgttgtatcttgtgtcgtactagtgccataagtagtggtatcactagacgttgtggtacttgatgaacttgaactggaacttgagctacccgttgtaattgaagctgtctcagagaagactgactctgttaaattactgtttgagagtcccagcgctttacggatgcgcttcgaattcttgtaacgttctgacgaagaggcaacttgataagagagcccatcgatcgtcgcgtcagtaccttgaacggtatatgatttggcatggtgagacgcattcttgtacttcgtatcgagtgcgaccatgtcattccaagttaagtcggtgcgcatgttcttagcgagttttttcgtaatcttttcaatattggcaattgacccaagtgagttagactgactaaccatggccataataacctgccgttgccgtttttgacgaccataatcaccctgaggatcgtcataacgcatccgtgagtaatcaagtgccgctgcaccattaagtttgatcttaacgcctttcttaacgttggcattaccgtatttgaaagtcagcttaggtgtcacggtcacgccgcccatcgcgttgatgatctgttttaaaccacccatgttcagtaagacgtagaagtcaattggaacatccagtaacttctctactgacttgacggcaccacttgcgcccccaatggtgtaggctgcgttaattttttgtgattgcccatcgatcatcacttgcgtatcccgtggaatactagtgagcgtcatactttcttttttaggattgattgtcgcaacaatcatggtatcagtccgggctgagaagtccttgccgcgacctagtgcaccagtatcagttcccaacagtagaatcgagaatggcttgcccttcttaataacggcatcaacattccgaagcttggtcgagccggtcgactggtaggtcgtattcatcgtatccttagcggcattccaggtcttgtagccccaccagccacccgtaacgatcaacaggacaacgacgattagtaaagtaattaaccaaggacgttttttgtgtggtttcaaatgtgggttacgctgttgctgttcacgatagcggcgttggcgtggtcccatttcattatcattgttattttctgacatattcgttcctcatcactttagatttttccctcaatagtcattttatgacgtttagcaaatcattggtccttaaagttagtaatttaaaaagattttaataatcaaaaaattactggcatcagtagtaacacaattatagaacactataagtaatattgtgaccggcgtcaaacgtttccatctataaattacggtacaagccatcataaaacagtggtatacttgaataattctcattgaattattattttacatagcttgatagcgatattcaatgatgagcaatttgttaagaggggaagactgagcgtgcaaattttacagacattcgtgcagagtattcaaggtgtcatgacgatcatcgtgatgattgcagttggttacttgttggcacgctggggctggtttaatgaaagtgcgactaagctgattgcccgattggtcactcaaattgcgctaccagcctatatgattgcaacgatcacaaagcagtttacagcgcataaattattatcaacgttgccaggattacgttttccagttcttaatatggctattttgtttggcatttcgttcggggtgatgcgagccttaaatattaaaaagagtcatcgcggcttatttgcctccatgtttttgaactccaatacggtgtttattgggctaccggttaatcaagccttgtttgggaatagcgcattgccatacgtgttagtttattacatggccaataccaccattttctggacgctgggcgtttatttgattcaacgtgacggtactggcactgctaagtttgacttgaagcagacactgaccaagatcttctcaccgccattactaggatttatgattggtgtcttgcttgttctaggaaacattcacgttccaaaattcttgatggatgatttctcatatatcggcggtctaacgattccgctgtccatgatctttattgggatttcaatggccaacgccgggttaagcagcatgcgcttcgaccgggatagcttgggaattttacttgggcgttttatccttgcgccggtactgatgacgctgatgcttattccaatgtcgattccattggagatgaagcaagtcttcattctgcagtccgcgatgcccgtcatgacgaacgcgccagttgtctccaaactgtacggggcggatgccgattatgccgcggtcatggtgacagaaacgacactattgagcctgatcgttattccgattttgatggtgatcgttcaagccaattttattcgttaattattatgtgacttaaaattaaaagtacccgaatgcgtgccactagtgacaggcgttgcgggtgcttttttgctggttattaatgatgaaaactcaatttagttcggtcaacaaggtttgaccaattagatactttctgctcagggccgtcccaacacgtctcgctggtagtttttgatgacaagctgatgagtgcgtgctggatgatggttgaggcggcaagatgccattgaatggttcaagcctgatgaaaattgttttcaaaagcaattaaaaattgaaaaaaataacgcctgattccgcgttaaacggcgttttcccgtggataaaagcgaggtagtatactgagctgatttgaaagtcacgtgaaaatggtgctatactgagaaccgttgcgtattaaattttgattaagaaggaagcgaacgtttcgtgaagaaagcatatctttacattgcaatttcgaccttaatgtttagttcgatggaaattgcgctaaagatggccggcagtgcctttaatccaatccaattgaatctaattcgattttttattggggcaattgtgttactgccatttgcattgcgggcattaaagcaaaccggacgaaagttagtgagtgctgactggcggctatttgctttaaccgggctagtgtgtgtcattgtcagtatgtcgctttaccaactcgcgattacggtcgatcaagcttcgactgtggccgtattgtttagttgtaatccggtatttgcgctattattctcctatttaattctgcgagaacggttgggtcgagctaacttgatctccgtcgtgatttctgtgattgggttgttgatcattgttaatccggcccatttgacgaatgggcttgggctgctattagccatcgggtctgccgtgacttttgggctgtacagtatcatctcgcgttatgggtctgttaaacggggcttgaatgggctgacgatgacttgttttactttctttgctggtgcgtttgaacttctagttttagcttggattactaagattccggctgtcgccaatgggttgacggccatcggtttgcggcaatttgctgccattccggttttggtgaatgttaatctcaactatttctggttactattttttatcggcgtttgtgttactggtgggggcttcgcgttttatttcttggcaatggaacaaaccgatgtttcaacggcttccctagtattcttcattaagccggggttggcgccaatcttagcagcgttgatcctccatgaacaaattttgtggacgacagtggtcggaattgttgtgattttgattggttccgtcgtgacctttgttggtaatcggttccgtgaacgggatacgatgggggcgattgagcagccaacagcggccgccactgatgatgaacatgtcatcaaagccgcgcacaccgtttcaaatcaagaaaattaattaatcgtggacggtcagggtgatattaatcagcttgaccgtttttttgtggcaagcgcgttatcgcacgtaacagctggttgtgactttgaaaaatgaaccaaatcgattatcataggaagtattgaagatagtaggtgggaaagagaatgacagaactagtattggttcgccatggtgagagtacggccaatcgggataatacgtataccggttggagtgacgtcccgctaacagcagtgggtattgcacaggctcatcaagctggcaagcgattacgagctacgggactgcagtttggcgctgtgcatacctcagtcctaaaacgggctatcgttaccgcgaatattatgttaagtgaaattgatcagttatggctgcctgagtataagacgtggcggttaaatgaacgacattacggtgccttacgtggtcaaaataaggatgtgactcgtcaagagtatggtaaggcgcaagttcaacagtggcggcggagcttttatacggtgccgccgttgttgacaccagctgaactagaccatgatcgacgttacaccaagtacggtgccgccgtcgaaccgcggggagaaagcttgaagatggcttacgaccgcatcatgccttattggatcgatgagattgcaccgcggttgttagacggccaaaaccaactcgtggtggcgcatggtagtacgttgcgtgcgatgatcaaatatttagagcatattagtgatactgggattgatggtgtcgaagttgctaacggagtgccaatttgttatcaccttgatcagcaactgcacgttatcggtaaagaagagtattaaatttagtaatagttctcctaagcggtacttttattgaaagtaagtgctaatctggactgtttttttagaccattattagattaatcgagcctgagttaagagcttcagcagacgctgaagctcttttttagttaaagtgttaaataaatgcccagtataagtaattataatcattgataataattgccgacgagtactcaaaaaatgatacaggcttaaaaaattgatataacagtgctttcacaactatttgagtcaatataaatatttttaatgtaataaaatccttcagttttcataaataaatataatatatcacttgtaatagaatggtaaacgctgtaacatatcagatggacaaactcgcgatttggcgcggttaacagccaaaaatctgatcagaaatcttgggttaacgatgatgaagcataaaaatttattattactaataataatgagcctgggtttttgcggcatgctgctgatgtttgcaccgcagcttagtacgctgatcaactcgaatacctcgcgagttgaagcggataagactagtgatcacgatacaactcatgatcaggtctactacaatgaccagatggataattatcaatatgattatataaataacgggactaaggttttgaattataaggctcgcttcaagaatcgggtcatcacgtatcggattacaagtgatagcaaggtgtatcgagcgatttggctacgagccgtggaacgttggaataacactaacgcggtgaggttagttgaggctaaggaccaagcgaaagcccagattacgttgggcgagagtgaagacgagacggagacgaccggatcggaaatcggccggacttggcggacgtactatcaaagtggttcgcaaggaacaacttggatggattcggcgaagtgtgtgatttacacgaatcgctttccagccagcaatcattcggtagaatataagctgtccgttgcgacccatgaattgggacatgcactgggactagagcacgagaacaacaagagtgcggtgatgtattaccagtcgcatcgagcagcacatatcacgactcgtgagattagtacgcttaagcagatgtataaataattataatagtgattgctataagtaaacgtaataataaaaaaatcgactaaactcacgcgagtttggtcgatttttttattgtttgttgttagtagttccttgagcggtagttaagtctaatgcagtccaaaaagcaccatcacgctaaagcagtgatggtacttaatttagatggcccattaaacttaattaggctaatgcacccattggatcccaaggtgctaaaacagttggttcttcggcttgggctgcctttaagtcatcggacaagaattccttgttaacaacaacttggtagcagtattcgtccatccaagcatcgctcatgacgaagaagcccttagtcccaactttgtcgccccagctattttcaaccttccacttagttggttggccgtcaacgaggtcgacaccggtgataaccatggcgtgggtcatcagactttcgccgtaatcaagacgttcagccttcgacattgaaaggtcaacgtcgaataattcatctttactgtagacatcggtagccatgacccctttttggcggtcggaggattgaccaacatcacaaccaaaccagacactttggccagcttgtaattgcttgatggccaattgcttgaagtcggccatagacacgttcaaatgtttgacttcacggccacctaagacgttacctaacatttcaatcgtgtaggtatggttataaggcttgtcgtcggttggggcgttgatgattgaaacgtaatcgtccaaattccagccaacgtacttttcgaagaagctttgtggcgtcaagttttggtcgatgtggtattgtttcttatcatcacgatattcccagtcaaaatgtgaaacgggttcgccaaaggcataggctaacatgcgatagacttcatttaacattttttccttgcgttcttgaatcgcgtcgtcactagttccggcagccactagttcacgtaattcaacggcatctttacgtaattttaagttaagtgtgctgttgatttcagccgattttgaactgttgtaagtttcaggcatgacactcttaggcacgataccgtacttctgaataatggcaacgagcatatcccattggccaccatcttgttgtggcgtggtcatcaaccaggcaactttacggctgctagttggttggtcagcggttgccaacacgttttcatagaaatagttcgctttttcgaacttatcccagaaaaaggtgtagttttgtgatagttcgaaatgtttcaagttgaatttttcagctaatgaatgccgcatcgtgtttaaagcggcgaacatccagcaacggccactttgcttttggttcgcaacgtcacctgtatccaaatcaatggaaaatactggtgtggtttggctcatggcctgaatatcttgactgcttgctaagataccgttcttagtgacactacgttcgatgacttttgcttcgggacgttggtccaagtcggcttgaaagttagcaatttggttcatactgattgctttactcaaaagatcactctcctttaatctaattctaattgtatcggtttatgacgggtggggcaagcggggagtcgcacaaaactatggtcgcgcttcgataacctcgggaccattggcatgaccgacaatgacagtgttgaccatgtctaagaacaggccgtgttcaaccacaccaaccatgtgaattaaatcttcggctaaagcgtggggatccgtgattgggtcgatgtgtaaatcaatgataatattattagaatcggtccggacgagttcatcgttgactttacggaatactgggttatagccccgggcagccattttttcaaagacatgttggctgccgtaaggaatcacttcaacgggtaagccaaaggcacctaattgatggaccattttgctttcatcaacaatccacatgactttatcagaattgatggcaacgattttttcgaagagtaaggcggcgccaccacccttaacgccttggaaatcatcggcgatttcgtcggcaccgtcgatcgttaagtcgagatggtcgacttcgtcaacggatttcatcgggataccgagcgccttagcttgggcagcggttcggtcggaggttgagacgccgacaatgtttaaatgttcatttttgacccgttcacccagagcatcaaccatgaatttaacggttgagccggttccgaggccgacctgcatgccgtcttgaatgtattcaacggctttttgaccaacaagttgttttaactgatcctgattcataatatgaattactcctttgattgagaactagtgactaatacgtcggcagcttcagggtgccgatcaaagtaagccttagcgtaggtacacagtggctgaatacgtttgtgttcaactcgagcggcgtcaataacggctttggttaattggccggcaatgccctgatgaccaaaatcgtcacgaacaaaggtatgttcaatgacccaggtctgatcattattgatggcggggaaggtaatttcaccagccaacttgccgtgatcgtcattaaaataaaagcggtgtgcttcacgcgtgaattccattgatttcaccaccttgtaaagggttttatatctaccgtaattaaaccggtaattgcccgttttgtcaacgaaacttctataataaaagtatggtaaaatgtgaacactaaattaatgttgagaaagtaggaatttgaaatggcacggggatttgaaattgtaagtcaatacgcgcaggcggggttacatgtaccttaccgcactaccaagcaagcagctggctatgacttcgaagcggcggaagattttacgttaccgtcaatttggaaaatgaactttatcaaagtactttggcaaatacatcatggtgaaacgagttctgcagccgatttggatgcggcggctaaagtccttaaaccatggcttgttccaacgggtattaaggcatttatgaatgatggtgaatacttactattagccaatcgttctagcaaccccttgaagcgtaacttgattctaccgaatgggattggcgtcattgacgctgactactataacaatcccaagaacgaaggtgcgattttcgtccaattaatcaacatggggattcgcgacgttcacattaaaaagggtgaacgcattgcccaagggatttttaccccttatctgactgttacggatgaaacgaatgtgacaacgacacgttctgggggcttcggttcgaccaataaataggaaataataaaaaatcggtaaagccaaggtgatttaaaggctttaatgattaataatggtaaaataaacttatacccatagcatgaaaatgacgatccagttaattgagtttgattgattatttaagtctgcatcgtactggctggttgtttagtaagaatcatggttaaaaggtgccaattagatagatttctgttcgtctgcaatgactatcctattccgacctccgggactgggtgacaattgctggaacgtaagccgacgtcgatttgagctaacgcataacccgcgtcatctcaaatacgagtcttattctaagccggaagaaagacacttccgcctaagaataatttggctactgagcattgtcacccagcccctccagccgggaagccgctcgaatggcaaataaacggccgcttaacttggtacaattggttgctgactactttgatacgaaaactttgagcgaaacatcagaatgtaatctctactttgtcgaaacgttcaatgtattatgactggtaactcagaaatagtaagtcatcacaatatcattttcggcctgacagttgattgagaaaattaccgtttatgaagaacaacgaccaattcatcaaaagttgagtacatcttcatcagctattcgaataccatcccgactggaaggtgtttctgacaatgcccagtactgcaagagtgtgaagtctcagtctgacccgaacacgtttcaccaatatggcataaaagcgtgaaaggccagtatttaagacgtgggcttcggctcaaatctgtgcccaccgcgttccggcaattggcagaaatgcctggaggtcggtgtaggacgaattaactaagcaagtttacgctaacccggactgtttccagcgggcctaagctggctgcttttaaatttaaaaaacggcacgttttaatcatgactcatgacagtgtgacgcggatgaagtaattattttagaaattccaatacccaacattaaattgatatgttggcggagaaatggagacgtgtgtacgtggcaaaagcaaaaactcagtttgtttgttctaactgtggttattcaacaccgcgatatttaggacggtgtccgaactgtggtgaatggaatacactaactgaagaacattttgatacaaaaccggaccgcaagtcgcgggtgagctttgcgggtaagtcggctaagccacaacgactcaaagaagtgtcgctgactaagacaccgcgtgtcaagactaagctgaaagagttcaaccgggtcttaggtggcggtgttgtgccaggttcactagttttgatcggtggtgatccaggtattggtaagtcaacgttactactgcaagtttcggggcaattggccgagacgggtggttctgtactatacgtgactggtgaagaaagtgcctcccaagtgaagatgcgggcggaccggctggctgttagcagtgaagacttttatctttatcctgagactgatatgtcgaatattcgttcaacgattgaatcgacgcatccagaatttgtggtcattgattcggtacaaacgatgcaagaacctgatatggactctgcgattggttcagtatcacaaatccgtgaaattacggctgaactactgcaaattgcgaagactaacggcattaccatttttattgtgggccatgtgactaagggtggtgccattgcggggcctaagatcttagaacatatggttgataccgttttgtactttgaaggtgatttacatcatacgtaccgcattttacgggcagtcaagaatcgattcgggtcaacgaatgaactgggaatatttgagatgcggacgggcggtttgtatgaagtggccaatccgtcagagatcttcttggaagaacgtctgaaggatgctacgggttccgccatcgttgtttcaatggaaggaacacgaccaatcttagtagaagttcaagcgctggtaacgccaacggtctttggtaatgcgaagcggaccgcaagtggcttggatcataatcgagtctccttgattatggcagtgttggaaaaacgggcgagtctaatgcttcagaaccaggacgcgtatttgaaagcggccggtggcgttaagttagatgaaccggcgattgacttagctattgcggtcagtgtggcttctagttatcgtgaccagcagactcgtccgagtgactgttttgttggtgaagtcggtttgactggtgagattcggcgggtcaaccggattgaatcacgagttggtgaggcggctaagctaggttttaaacgtatctttattcctaagaataatctgcaaggttgggatatcccaactggaatcgaagtaattggagttgccacgctaaaagaagcgctccaattagcattacaacaaccaaattattaaaaaggggctgatgccatgaagaagttaacggtgcgactagtatttattgtcgtcgggggtacgttaggactaacttacctgccgttcttgtggacgacaattttgtcgcaaccaaatgtgttattgaataacgtttttaccaactttttgttgggggcgctgattctatgggttttgtcattgttcttagccaatgccgctgtacgactggtggatcgagtcgaaaagaacttatccaagcaaaacccaatgacacttttatttggcagtatcggatttattattgggttattgatcgcggttctgatttcgcaattatttaatcgtagtccattattcctattgaacacggtcgtcccaattattttgatgttgttttttggttacattggtgcgcgagtcgggactacccggatcgacgagtggcggaaagttttcaacttccgccgtcgtgaaaaggaaacaagtccggagattactgatgctcagccagatcagaactatcatcattataagattctagataccaacatcttgattgacggccggatttacgacattgtcaagactggtttcttagaagggacactgttagtaccgaacttcgtcttgtatgaattacagtacattgcggattcagctgatagtattaaacgtgtgcggggtcgtcgcgggctagatattttaaataagctacaaaatgaaaatattatcccggttgaaatgtacgagggcgattttgaggatattccagaagttgatagtaaactcattcaattggctaaaaaagtcaacggtgtgatcgtgacgaatgactacaacttgaataaggtgattgagttccaaaacgtacaagttctcaatattaatcagttggctaagtcgttgaaaccacgggttattcctggtgaagagatgaatgtcatggtcgtcaaaaatggtagcgaacgccaacaaggggtcggttacttggacgatgggacgatggttgtcgtcgaagatgggaagttttacatcaatgaaaaggtggatgtcgttgtaacgagcgccttacaaacggatgctggtcgaatgatttttgcccgtttagcgcacgctaatcgcggaattccggatcatgcggatggaaataataagcacaacaataatcatagtaataatcgaaataataatcgcgataatcggcactaggttaagcgattcaacggtagcaactcatttgatgggggctaccgtttttttgttcaatgatgactaatccaggacgtcgtaagggaggcggccgaatcgcaacaaaataggagggttaatgctcattatcaataaattgggatgttgttagtgtacgattagggcctgtttcgatatttttacaatgggttcagtctgaaaccttaatttttagcggtaaacatggtaaactggaaaagcaagtgaaagtcggaatattctggtcgatagaaaggttccggcgtaacatttaagatgaaaaaatacgaaagaggcgttaatcacattggcaaagagcaagattcgtgtgcgttacgcaccaagtccaactggccatttacacattggtaatgctcggactgcattgtttaactatttatttgcccggcataataagggaaagttcattcttcggattgaagacaccgatttaaagcggaatgttaaagacggtgaaaagagtcagatggacaatttgacgtggttagggattgattgggacgaaggtccggataagggtggcgactttggcccttaccgtcaatcagaacggaaatcaatctatgacccgttgattcaacaattaattgatgaaggtaaagcttacgaatcttacatgacggaagacgaattgtcggcacaacgtgaagctcaaaaagcgcgtaaggaaatgccacactacgtctacgaatttgctggcatgacggaagacgaaaaacaggcgaagatcgcggctgctaaggcggctggtatccaacccgttattcgcttccacgtcccagaaaatacgacctatgcttgggatgacatggttaaaggtaaagtttcgtttgaatccaagacggttggtggcgactttgtcatcaagaagcgtgacgggatgccaacgtacaactttgcggtggttgttgatgaccatatgatggaaattagccacgtcttccgtggtgatgaccacgttgccaacacgcctaagcaattgatgatttatgaagcctttggttggcaaccaccgaagtttggccacatgagcttaattatcaataccgaaaccggtaagaagttaagcaagcgtgacgaaaccgtattgcaatttatcgaacaataccgtgaattgggttacttaccagaagcaatgcttaacttcatcatcctactaggatggtcaccagttggcgaaagtgaattgttcagtaagcgcgaattcatcaaaatgtatgatgaaaagcggttgagcaagtcaccagcagcttttgatggcaagaagttggaatgggtgaacaaccagtacattaagaaggctgacgaaaatgaagtctttgcaatgtcaattcgccaattgatcaaggctggccggttaccacaacgcccagatatgagccagattgaatggacacggacgttggtttcattatttaagaaccagatgagctatactggtcaaatcgttgatttagcagatctcttcttcaatggtccggctgatatcaatgatgaagctaaggccgaacttgataatgacacggcactccctgtcttgaaggaattccggcaacgaatcgaagatattgacgtcttcgaagcaaccgcaattcaaaagacgatcaagagcattcaaaaggatacgaagatcaagggccgggcattatacatgccgatccggatcgccgtttctcacgaaatgcacgggccagaattaccagaaacgattgaattattagggcgtgaaacgaccaaaaagcatctcgatgctatgattgcggaactcgccaagtaatgaatggattattaaaatattagttggttgtcgtaagtggcggtcgtcgtcagcaagacaacgcaattaatacatcgtgcggtcagcaagctagtccccgggtgagcgttatctcagtatcgcgaaagttacccagtggcgcgtgactgcatatgaaagtatcttttgtatggtggagtttcggttccaccgtgcgagggatgctttttatttgtgtttcaaacatggtaaactatcatcaaaagtaatgattcaattgaaaggagttgtcgccaatatgttaagtgtttttaatacgttaacgcgtcaaaaagaaccgttcaagcccatcacccccggagttgtgaaaatgtatgtctgtgggccgaccgtttataactatattcatatcggtaatgcgcgttctgcaattgcctttgatactatccgacggtattttgaatattgcggttaccacgttgactatgtctccaacttcacggatgtggatgataagctgatcaaacgtgccgctgaagatcacaccacggtaccagcagttgctgaccggtttattaaagcttttatggaagatacgactgcggtcaatattgaaccagcgacggttcacccgcgggcctctgagaatatcccagaaatcattgcatttgtacaagcattgattgaaaagggctatgcttacgaatcagctggcgacgtatattaccgcgcacggaagtttaaaaagtatggtcagttatctgaccagcgaatcgatgatttagaagtgggtgccagtcagcatactgccgatgaagaaaccgatcgtaaagaagatccaattgactttgcactctggaaagcagccaagcccggtgaaatttcatgggaatcgccatggggtgcgggtcggcccggctggcatattgaatgctcggtcatgtctactaagtacttgggcgatacgtttgatattcatggtggtggtcaggaccttgaattcccacatcatgaaaatgaaattgcccagagtgaagcgaagaccggcaagacgtttgccaattattggttacacaacggttttgtgacggttggcgatgacaacgaaaagatgagcaagtcattaggtaattttgtgacggtccacgatattattaaaacggttgatccgcaagtgctacggttcttcatggcgacgacccagtaccggcgaccgattcaatatacgcaggccaacttagacgaggcagctaataacttggataagttacgtaatgcttatcgtaatctcacgttccggttgcaagatgcgacgaacgggacggatactgcggtggcagaacagttacagacactcatcactaactttggaaccgcaatggatgacgatttcaatgttcaaaacggggtggctgctgtgtatgaattagctaagttagccaatgtctatgcagccaaggcaacggttcaaaaagagacgttgattgccttacagaaggcattagtgcagttgactggcgtcttcggcgtcacttttgaaatggttaatgcgacgctggctgatgacgcgattcaagcactgatcgatgaacgagaagctgctcgtaaagctaaggattttgctaaggccgaccagattcgtgatgatttgaaagttcaggggattattttagaagatacgcctcagggtgtgcggtttagaaaggaataatatgcaagttgattatcaacaattaaacgggattgcactcgcgtacctcggtgacgcggtgtatgaaccgtttattcgccaacatttgattgaaagtggttttactaaagccactaagttgcaccaccacgcaacccactatgtttcagccaaagcgcaagcggcactgatcgaacggatgcaggccgaagaagttttaacgccaactgaagtggacgtttttaagcgtggacggaatgccaagagtcatacgtcggccaaacataccgatgtcgtcacttaccggatctcaaccgggtttgaagccgtttttgggtatttacaattgactcagcaggcggaccgaattgcagaactggcacagtggtgtattaaacaagttgatgaagggagggtttccagtgtcaaataacgaacaagaccaaacagcagctgactttgtaatcgggcggcaccccgccatggcagcaatcaagagtgatcaacagatcaacaaagtctttattcaaagcggtctacaggccgatgtactgaatgacattgccaagattgcgaagaaacgtaatttgatcgtacagtacgtgccgaaacaaaagttagaccgtttaaccgacaacgccaaccatcagggggtagctgtgggggtggctgcttttgaatatgccaccattgatgatttatttgctgttgctaaggctaagaatgaagcgccatttttcttgatcttggataatatcgaagatccccataacttaggttcgattatgcggacggccgatgcagctggcgcccatggcatcattattccgaaacggcgcgccgtggggttaaccagtacggttgccaagacgtcaacgggggctatcgaacacgtgaaagttgcgcgggtgacgaacttggttcaaacggttaaacaattgcaagaagccggtctgtggatctttgggactgatatgaacgggacggactaccgacagtgggatgcttccggtgccgttggtttgattattggtaatgaaggtaagggaatttcaccattacttaagaagagtgtggacgaaatgttgaccattccaatgattggtcatgttcaaagtttgaatgccagtgtggcggccagccttctgatttatcaaggctacacgtcccggcatccactgggaaaataagatgaaacaacaattattgattgtcgatgcttacaatatgattggcaactggccagaactcaatcatttaaaacaaacggaccggttgccgcaagctcgtgacgagttaattagcatgttgactgagtataaaaaaattacgggccttaatattagcctggtttttgatgcgatgtacgttccgggtaattctaagagttatcgccaagctgatcttgagattatttggacgagtaaagaccagaccgctgacagttatatcgaaaagtacgcgggtgaaaagcaatcgcgagtacttcaagtgacggttgcgactagtgatcaggcagaacaatgggtaatcttttcggaaggtgcgctacgagtaccagctttggaattacggcaccgcgtcaagactgcactgaaagatgtgcgtcataccgccgtgcgtacccaggatttaggtgccgttcgtaaatcaccctggaatgaggatcaattatcggccttggatcaataccgccaacaactagaacgcaatcacgttaaacatcatcacaagtaattaggtggttgccgcgagcgtgggttgtttctaaatcgtcataattaatatttaaattttgcaaaagataaccagtggcaatttaaggctcgaaagcagttctagtattaaaatatctagtaatcaaatgccccagttcagctgctgttcactagatgttaggatggcttgtcataacagttttggtgttatcggagtttgcgctggcgattgcattaatcggttggttagacagcgcagtggcttcttgcaactccagcggacgcgcgtactcgtcgccaacgggcttaagtaggtcgcacttgtctttggcgttagcaatattttgatattactaataattagtgcgatatggcactattaggttgatgaataggacgatcatagtagttttgatagccgcgtataagaggatttctgtgagtgctgaggtggctgaattgaaacgttcgttcgcttgtgacggcacaattaacccggtatattagcattacagatgctcaggggtgcagtttctgaaactagtcagaagcgaggaatgtcacgtgaatgaacagcaattgatccacttagcagcagatggtgatgatgcaagcattaatgcattagcccagcagtatgtgccagttgtttggcggttgcggcggcaatactatgtccggaactttgacgaggatgattggcttcaagaaggtcgaattgcagtttatcgagcggctaaaaagtatcaacggctacggcaatgtagctttggcacttattaccgggtgctattgagtaatcagattattgatcatattcggcggacacaggctcgcaagcgtcgtccggaaggggatatcttatcactggatgttaatgatgaggatatcttatgcaatattcagacgctaagggcctcgacccttgatgtggttcatgttcgtgagcaggtgcggatttttccagcaatctgttcggcatttgaaggattggtttttatggatctattggcagggcaatcgccagaacggattgcattgagtcggcaagtggaagttgatcaagtggtcaacgccacggatcgatgccgcaagaagatgcgtgactttttacaagacgctgcctgaaattgacattcgaaaagttccatgctaatgttatacctgatttattatggaggttttgtcgatggcacagaaaaaagttgcactggcatgtaccgtttgtggttcgcggaactacacgattgatgctaacccgaatcgaactgaccgcttagaagttaagaaattttgtaaatattgtggtaaacacacacttcatcgtgaaacgcggtagggggattagacatgcgcttatttaaattttttggtcaagttggacatgaaatgaaaaaagtgacctggccaacttggcgggaaaatcgtcgtgattcgtggacagttgtctcaacatcactgttcttcgtggcgtttttcgctttatttgattggattatccaattattattacaaatgttaacaagctggcattaatggctttttgaacaaatttttgttataataatggcattgaaagaaaacttcgtgcaaacgaggtttttttattttgccaaaagacattttaaaggagaataataatggtcgagtctgttgagaaaagatggtatgtcttacatacctacgctggttatgaaaataaggttagttctaacttggaatcccgtattcaatctatgggaatggaagacaatattttccgggtcgttgttcccgaagaagaagctcatgaagtcaagaatgggaaagacaaagttgaaatgaagaagatcttccccgggtacgttttggttgaaatggtcatgacggaccaagcttggtatattgttcggaatacgccaggtgttactgggttcttaggatcacatgggcaaggtagtaaaccaacgccattgttgcctgaagaagcggaacaaatcttgcatcaactaggcatgagtgctcggcataccgaattggacgttgaagttggcgaacaagttaccatcatcgatggtgctttctctggcctttctggtgaaattactgaaattgacaacgaaaagatgaagctcaaggttaatatcaatatgttcggtcgggaaacaagtactgaattggacttcgatcaagttgaccagattcggtaattaatttaagtaagctggtggaccatcttggcagaagtaattttagtcatcatcggcgccttagtgctcggtattttggggcgtatcacctttaaattttggcaatacgggcgaccgcagcatttgcggcagtcggtgtcggctaattcagcagatgatagcgccgtgacgctatttattccagggtatgcgggcaaccggttctcttttggtggcatgctccaacgttttacggccgggggcatcgccaataagtcattagtcgtaatgattgatcgacataatcatccccatgtgactggtgagctagacgcttaccgcccaatggtacagttgatttttgccacgccacgcgttgctgtacggcaacaggcggcgggcgtcttggcagttgtgcagtatttgattgcgcatgagcacgttcagacgatcaatttagtcgctcattcgatgggtggtgtggtgctctttcaatacttgacgacagctgccaaactggtcaatttaccggaagtccgcaaggttgtcacaattggtgcgccgtttaatgatagtgaggtcgggcagaatacgtatccgattgaaaaccacccgttgacggcgaccggaccaactaagaccacgcccgtttataattattttttgcgaacgctccaacgattgccaaacacgatttcgtatttgaatattgcgggtaacattggcgatgcggcgcaaagtgatggtgctgtcgctctgaatagtgcgttgtcattgcgctttttactgcgaccgacgcgtgaccagtatcaagaatttgtggtacatggtaagaatgcccgccattcacgattacatgaaaactatgaagttgatcgccaaatcgtccagtttttatatccagaagccacaaaaaaggttgctggtgaaaaatagatatgctacaatggtatttgtgcgtcacgtatgcacgtttacgtgggaggagcaaaaactcagctccatttaccacatcacggactaaggaggaatgtctcgtggctaaaaaagtagctaacgttgttaaattacaaattcctgcgggcaaagcaacacctgctccgccagttggcccagctttaggtcaagcaggtatcaatatcatgggtttcacaaaggatttcaatgctcgtactgctgatcaagcaggtatgatcatccctgttgtgattacggtgtacgaagatcgttcattcgacttcatcactaagaccccacctgctgccgttctattgaagaaagctgccggtgttgaaagtggttccggtgaacctaacacgaagaaggttgcaactgtaaccaaagatcaagttaagcaaatcgccgaaactaaaatgcaagatctaaacgcagctgacgttgaagcagctatgcgcatgatcgaaggtactgctcggagtatgggattcaccgtcgaaggctaattcagtactgttgagtatgtcggacacttcatcaaaatgaatgtgtcaagtgggaggaaatctccgtttgaaccacatttgcaaggaggaaaacacttagatggcaaagaaaagtaaacaataccaagacgccgctaagctcgttgatcgtgacaaagcttacgatgtaactgaagcggtagacttggttaaaaaaatggatttcgcaaagtttgatgcaactgttgaagttgccttcaaattaaacgttgatacaaagcaagccgaccaacaacttcgtggcgcggttgtccttcctaatggtaccggtaaagatcaaaccgttatcgtttttgctaagggtgacaaggctaaagaagctgaagaagccggtgctgactttgttggtgaaactgatttagttcagaagatccaagacggttggttagactttgatgtcgcaatcgctacccctgacatgatggcccaagttggtcgtttaggtcgggttcttggacctaaaggcttaatgcctaaccctaagactggtacggttacgatggacgttgctaaagccgttaacgattcaaaagctggtaaggtgacttaccggactgaccgtgacggtaacgttcacgttcctgttggcaaggtatcattcgatactgacaagttagttggtaacttcaagaccattgaagacaccatcgtgaaagctcgtccagcctcagtacgtgggactttcatccaaaacttagttgttacttcaacctttaccccagcggtacgtgttgatttagcatcattttaaggattaaattctgaaaacaattgaccccgtgggtgatctgtgatagattactagaggttaagtaatatctctacctaagactcaggcggcttaacggccttaatctacctgccgaggacattgttttttctctatgtcttggtggacatagggatttttttataaatccctgaaccaaaattctgggaggtgaatctgttgagtaaagaaacaattgctgttaaagcacaagaagtcgaagaagttgcagaacaattgaagagctcagtatcagccattgttgttgattaccgtggtttgactgttgaacaagtaactgatttacgtaagcaattacgtgaagccggtgttaagatgcgcgttatcaagaacaagatcatggtgcgtgccgctgataaggccggatttgaagacttaaaacctgtatttgctggtcctactgccgttgccttctctgaagaagacccagttgctcctgcaaagatcttggctaacttcgcgaagaccgctgatgcccttcaattaaagggtggcgtgatcgaaggtaaagttgctgatcttgaaactgttcaagaatacgctacgatgccatcacgtgaagaattattggctacgatcgccaacttgttacaagcacctgttcgtaacgttgcatacgctgttaaggcggttgctgaaaaaggcgacgaagacgcagcttaatttgctgtcagtgtgttaaaaaaactaaaatataagttcatataaaatggaggaacaaaaaaatggcttttgataaagatgctattatcgactcattaaaagaagcttcaatctcagatttaaacgacttagttaaggctatcgaagaagaattcgatgtctcagcttcagcccctgttgctgttgccggtgctgctggtggcgacgctgccgctgctaaggattcatacgatgttgaattaactgaatccggtgaccaaaaggttaaggctattaaggccgttcgtgatatcactggtcttggcttgaaagatgctaagggtcttgttgataacgtaccttcaatcatcaaagaaggcgtttcagaagacgaagccaacgatatgaaagctaagcttgaagaagttggtggtgtcgttacccttaagtaattatttacttaacggaacgtcatcagaccacaccctactatggggtgtggttttttttatctctgaatgtggctttggtgtgaatcatcacgtgcatgaccacgcatataacgattactgagaatttatacttaggctaagtgttagtgcaatttgatatcaaccaccgtatgattacggtgacttggcgttagaggcgtaaccgtattggattaagcaagtcaaaacaagcccaacagaacgtcgcatagtacgtctgttgggcttgttttaaaatttcacttgggttgaacttctggtcaacagggcactatcacttttgtggctgctgcgtgataggctgaatacgatgatcaatgatcgttagtgactgacctgactagtgccatcagtatagttcaaggtcataccgggctggatattgaaaatatagacattaaaactaacagtattgctaccaactgactgaccacgcatttgaacaccgcgggctaacaattcgttacctttgaaaatgggggtcacttggtagcggacgtagtttttcggactttctttcaaataggccgcaacttggttttcataggtcgtcatttcagggtcattcaaagaacgggttccggtcatgaggttcttgatattgttgttctgccccgttaattgatagccaatcagatgactgcggttgtaaagccaaccgctactgatgcgtttgttatgccaaccagttggtcgaacattcaaggcctcacgttcagctttgggcatcagtgactgatttaagagggcattagcagccgtcacccggttaagtgagtctaaattgccatattgttgccaggcaccctgactcgtactgagctccttagcggtaaatgcgggctgattctgattaatcgtgatcgtttgttgaccgttgtaagttttactagccaacgcattgttacttgggttatggtcagaattgaccttggttggtgctgttgtcgaagttgcgccagcttgcttgttcgtagccttgagcttgtcaatatgttgttgactactcgaaagttttttcgcagcctgctttaagctgctagcagaagcacgattggcagcttgaagtgccgtcagttgcttgtcattattagccgttactaagtgggtcttagtaacggtctttgtcttcacagttggctgagtggattcatcagatgtgccgagaatactaaagctgacgagcaatgcgataatggccggccaactatgccgccaccattgacgcccacggtagcgccgatgcaagcgccagaaccagtacagggttgcaaataataagatggtgccgatcaatgccatgaagtgatcctcctatcgaaatgacttacggaaaccagcggcccgcgccgcgtcttccgtactaaagtaaacggcatttttaccggccatccggtagttttgacccgtttcaacgtgataaattttggaattacggttacccacgatgcgtccagtttgggcggtatcggtatcgccagaaaaattattctgccgactcgtggttgcggtactagtttgagtttgttgactttgagcagctgcttgactgctggccttgaccgcttgcttagattggctagcggctgcgacggccgaagcggactgggcttctgactgggagcgtgattgtgcggccgcttcactagcagctgatttggcggcagcctgtgacgctgattttgatgatgccattgcgtcgtcatgttttgcttttagttgttcggattgacgcttagcctgactagttgcaattgcgagttgggtcgtgtttgaactaagagctttggctgaggccgcgttagcccgactagcggcccttgcttttgcccaggcggctttattagcagcagtccgtttctcaacccgaaccgtcttggttttgacactggtatggttggcggcttgttgattaccagtggtacagccggttaagatgagtagactcgttagtgcaacgacgagtttttttgcgtggtgcataagaaattcctccttatttatgtatcactttaattatacataaacggtaaaggttggtaaagcaagtttggtaactaaaaatcaattaatattggtttatgctggtattaatttcgacaattaatcataattagtgctaactactaacacccattcggaacaatttagtagtagatatttaaaatgttcatagcttaatacggcgacaaatcagacctgtgggggttattaacgacctataacggttgtataaacaggctaagattgcgataatagaacaaacacaccaatgggggaatttttttgaaggcaacgttacagaaaatcgggacggcactcaataaacgcatgggaatcatcaaagcattatttgtattctctgtcctgttatttgtgattacggaagtcggcaaaattgcgaaggaagtcagtggcgcgcagttggcgaatgcgcttgcttcgcaaagctggtggcatctgttaagcatggtcgtgattggtattatcgcagtgacaccaatgctgacgtatgacgtcatgattacaaagtttttacccaaccactattcacttggctatatcttaaaagctggatggatcaccaatacatttacgaatatcggtggttttgggggcgtgctgggcgcctcactgcgtgctaacttttataatcgcgaagccactaagaaacaaatcgtgtttgccatttccaagatcgctttgtttttagtttcgggattgtcattatattgtatgatttcactcgtgctagtctatggctttggcattgggaacatgtatggcagttactggatctggctcgtcggtggtgcactgtattttccagccatctttatttttacacgagtcaacgattcggaattcttcgatggccttacgctcggcaacgtcgttcggttattgagtgggtcgtttggtgaatggactggctgtgtgctgttcttcttattaattggaaactttatgggattacccattgattttgcagcggtcgtgccgttattcgtgattgcttcggttgtcggtgaagtgtcaatggtacccggtggtattgggtcattcgacgttttcatgatttttggcctcggtgcggtcggagtttctcgaccagacgcagtcgcatggctcttattttaccggttattctactatattatcccgtttgccatcgggttggtcttattcatccatgacaccggccatcgcttaaacgtgcgcttagcgggtattcctaagcaggcattacaacgtgttgctcagatggtactgacggtttttctctatttttctggttttctgatgttgttgatgtcaacggtccctaactttgcatataacaataaactcttcttacagttttatccgtacacctttttctttattaatcaggccagcagtattattatggccttcttactgattggggtggcgttgggaactgctggccgggtcaaaaaagctttttggccaacggtgattgtcctgctgattgcaattttgaatacgattcgctggctcgtcgtttatgatgcaatttcgatgaaatttgtgattttcttgattgtgattctagcgctagtggctttgtcgcggcatgcttattatcgtgatcggttggctttttcgtgggggcaaacgttgtgggttagctgcgtgtatgtggtgacctttatcttgtatacgattgtgggagtctataacgcgccccaaattcatcatcggcatgcggttcctgaagctctgttcttcccatcacaaaagctctggttatttggagtgattgggttagtcttagcggcaatgattttgattattatgtaccgctactttgcgagtggttataacgcccgattacgtcaaaagatggatgcggctcgggtcaaacaagtgattgaaacttatggcggcaatgaaatctcacacttggcttatttgaatgataagttagcatattactatcaagtcgatggggtcgatcaactgattttcttataccaacagaaggccgataaactgattattatgggagagccattcggtaatcaagcggtattacaaactgccttggaacagttattggatgacgcagatagtgacggttgctcgctagtcttttacgaaattagtgagatgctgacgatgcgcctacacgaaatgggctttgactttatcaaaactggtgaagaagggcacgttaaattggcagactttagtttggctggtaaacggctacggggtgagcgggccctaatgaataagtttacccgtgatcactatgagtttaccatcttgcagccaccgttcagtgccgacgttatggctgaattacgagccgtttcggatagttggttagcaggtgagacggaaaaaggattctcgctcggattttttgatgagcagtatctcaatcaggcacccgtagcggtcgtttatgatcctgaccaccgaattgtcgcgtttgcgaatattatgccgcagggaaatcatcagacgacttcaattgacttaatgcggtcaagcaaatcggcgccatccggcattatggacacggtctttgtgcacctatttgaacaggcgcgtgacgatggctatgcttatttcaatatgggaatggcaccattatccggtgtaggggtttcacgctacagttttattcaagaaaaaattgctcatttaatttacgaatatggctaccagttatatggttttcagggattacggtcgtacaaagagaagtatgtgactgagtgggaaccgaagtacattgcgtaccgaaaacgtaattcactaatcttcaccattttacaattgctacaagtcgttaatacccgggtacacaagtctgagcggcaccggccagtatggttgttgaaacgattgaaataactgaatagtatgtcataaagtaagtatcgttaatgacatagcaaaatgccccatcactgcgagaagcaatgatggggcattttatgatgactttagaattcagccgactaatatgatgagggctgaactaattgtggcagaagcactagagctgttttgcgtaggctagattatttagttcgtatacttaggcggtaacacatgtttgaaatcatggaaaccagcgaaaatttcatcaagatcatgcccattaatgaataggtcgaggttagcctcgggggcaaaccctaaatcggcggtcttttgtagcatggcgactagatcgtcgtagaagccgtcgatgttgtagagcgcaatcggcttttggtgaatatccatttgactccaagataacatttgtaagaattcttcaaaggtgccaaacccgccaggtaaaacgataaaggcgtcagcgaggtgaagcatcttttccttgcgttcggtcatcgtgcgcgtttcgataaaagtcgtgacgtccttaaatgcaagttctcttgcgaccagaaaatgcgggatgatcccgataacgcggccaccagcatccatagttgctttggcgactttccccattaaaccatggtcgccaccgccatagacgagttggtaatcattagcggccaagtattgaccgagtgccaccgttttctcactaaatgcgggatctaaaccagaattagacccacaaaaaacacagatattatgaattgccattctaaactacccccaagataaaattttctagcaaaaatgcggcccggataggcgccgcatttttgtgaactaacgtgttgattaatcgtctggattaccaatatcgtagtcggtgtcttgcattgcttcaacttgacccaagcggtaaccattcccaacttgtgagaagaagtcatggttagaagtccccgttgaaatcccgttcatgacgaccgggttaacgtcttccgcagtatctgggaagagggcatcttggccgagattcatcaaggctttgttggcgttataacgactaaaagtcaagacttcatcagaccaaccaatttgatcgtaaactaaatgaatgtagttttcttcattctcatagagtttgtataagaaatcgaacatccagtctttaaattctgcctgctgcttttcagaacggtctttgaagcctaattggaacttataaccaatgtaagtgccatggacactttcgtcccgcaaaatcaatttaatgatttcggcaacgtttggcaattggttgtggcccaagtagtacagtggcgtatagaaaccagaatagaacaggaaagtttccaaaaagacgttcgcaactttttgcttcaatggatcttcgtcgatgttatcgtaaagcttgtagatccattgggcttttgcttgcaagaattcttcactgtcactccagtcaaaaatttcattaatttcgtccggcgtattcaatgtttcaaaaattgttgaataactctttgcatgaacggattccatgaactggatgttattcaatacggccgtttcatgtgaggttaagacgttgcggcgaagtgcttgcagaccgtcttgtgattgtaacgtatccagcagcgtcaaaccgccgaaaacgtgtcccacgacccaccggtgatcatcatctaattcacgccagtctgccatgtcgttggaaactggaatccgggtgtctaaccaaaattgttcggttaacttttcccaagtacttttatcaattgcatctgaaactcgatcccagttaattgccttatagttgccattactgagcagtttttggtagtaagccaagtctgttgccatttgttatcctcctagagatctaagatactaaattacgcagctttcacattcgttaacaccgacttcgccatcgtcgtccgtaaaggtccgaatataataaatcgatttgatccctttgcggtaggcgtagttccgtaaaatgtttaagtcccgcgtggtcatcttatcagtgcgaccatctttccattcgtataagccagctggaatagttgaccgcatgaagagggtcaagctcattccttggtcaacgtgttgttgagcagccgcatagacatcgataactttacgcatatcagtatcgtatgctgacttataatagttaattgtatcattagataggtaaggagcgggataataaatcttaccaattttcttttcttgtcgttcttcgacccggttgatgattgggtgtaggctggcagtcgtatcgttgatgtacgagattgacccatttggggcgacagccatccggttttgatgatagagaccatcacgcataacggcttctttgaggtcttcccaatcagctttggttggaatgaagatactgtcaaacagtgcagcggtcttgtcatattttggttgccaatcttgggtggtgtacttgtcaaagtaagaaccatcggcatacttggatttttcaaaattaacgaaggtttcgtgacgttcacgcgcaatttcgttagaagcttttaaggtccagtagtttaagagtaagaagtagatattggtaaagtcaacggcttctttactgccgtattccatctgattcttcgcgaaaaaggcatggagccccatggcacctaacccaatggtatgggcttgacggttccctttttggatggaaggaacgacgtcgacgttagagtggtcagtaacaaaagttaacgcgcgcaccatggcttcaacagaatgtccaaagtctggagaggtcattaagttaacaatgttagtcgaaccaaggttacaactaatatcagttcccaacttctcatactgttgttggtcatcaattaatgatggggtttgcacttgcatcacttctgagcacaagttactcatcacaattttaccgtcgataggattttcgcggttcgcggtatcaatgttgacgacgtatgggtagccagattcttgttgtaacttgctgatttcattttcaaggtcacgcgccttgatcttagttttacggatgttcgggttcttaaccatattgtcgtattctttggtgatatcgacatatgagaacggtaccccgtattcgcgttcaacgccgtaaggactgaagagatacatatcagcgtcagccttgatcaactcgtaaaacttgtcgggtacggtgacaccgagtgaaagcgtcttgagccgaatcttttcgtcggcgttttccttcttagcagaaagaaaggcaataatatctggatgaaagacactaaggtaaacgaccccggcaccttgacgttgacctaattggttagagtaggagaaactgtcttctaataatttcatgacgggtacgaccccactagcagcgccatcgatatgcttgattggatcaccggcaccccgtaagttgctgaggttaataccgaccccgccaccgatccgagaaagttgtaacgcggagttaatcgtccggccgattgagttcatatcatcggtcgattgaatcaagaagcaagaaatcaattcaccacgccgggcccggccagcattgagaaaactgggggtggctggttgataacgttggtgaacgatttcgtcggccaggtccatcgccaagtcttcattaccatcagcaaagtagagggcgttcattgccacacggtcaataaagttttccaagtaatagtcgccatcatccgtctttaaggcgtattgggcataaaatttgtaagccgccataaacgtcttgaagtggaagtcttgcgaccgcaagtaatcgtaaagtttttcgataaagctaaaatcatacttatcaatggcaggggtttccaaatagtcgtgttcacgtaggtagtcaaagcgcgccttaagactatcaaatttcatcgtgttcggttcaacattttgttcaaggaaagcggcaagtgcctcctgatccttgttgagcggaatctgattgttaacgggaatattgatctcattatttaagtcgtaatacgtgacgtcttttaaatcttttaaggtcataaggaatcctctttctatcagtataattgtggctggcaaaatcgacgacccacaatcagtaggttgatgattgtgggtcgtttatcatattttaaagggtaaaccagctatgtaaccacgcaaaaaagcgtgaacaaactaaacagctaattgttttaaagcatccggacggaagccggcaatgctgtcttcgccattgatttcaacgaccggaacagcatggaaaccttgattcttcaggtaatcgacgtattcaggattcgtattgatgttcttctcttcaaaggcaatattgtgcgccgtgaggaacttcttagtcatcttgcattgcatgcagttgtttttagtaaatacagtaacttttttcatttttcatcatcctaactcgtttttctgataaatttagtatacaacatgtggtgaaaaaaacaatcaaaaaacacaacatctagggtgtggtaaaaatcacaagtcctagatgttgtgttagtgtcagcttttaaccgactaaaaagttttttaaattatttgtggttcactcgctgaatcagttatcatagatatagaccagaaatttagaggaaaataaatatgaccaactattattatacacacaatccggatattgtgcatgatgaaaagcaatggaattttgaaatttttaatcactcgtttaaatttacgacggacaacggtgtcttctccaagcgtaccgtggattacggctcacgaacactacttgcagcgtttgatccaactgatttgccagcgggcccaatgctagatttgggaaccggatatggtcccattgggatggcgctcgcgtatcaatcacccgaacgaacggttgatatggtcgatgtgaacgagttagcgctaagcttagcgcgtaaaaatgttgctttgaaccaaattacgaataccaatatttttacgtctgatgtctatcaacaagtgaccgcgactaattacgcggcgattgtcaccaacccaccggtgcgcgcaggtaaggcagtggtggatgcgatgttaacgggggccgtttcacggctagtcgttggtggaacactcaccgtcgttttacagaaaaagcagggcgcaccatctgcgaagaaattgatgcaaacgacctttggtaattgtcaggtgattaagaaggacaaagggtattacatcctacaaagtgtaaaggagggatagtcgtgacggaaccaacagcggaagactggatgcaagaagcattacatgaagcgcggatggcctacttaattggcgaagtgccgattggggccgtgatcgttcaccagggtgaaattattggccgtggtcacaatttacgggagcatggtcaggatgcaacgatgcacgcggaaattattgcgattcaggaagcttgcgaatatttgcatagttggcgattagccgattgtcagctatatgtcaccttggaaccatgtttgatgtgtagtggggctattattaatgcacggctacctgaactctactttggtgcccgtgatcccaaggctggcgccgttcgtagtttgtatcaggtgatggatgatacccggttaaatcatcaagtaacggttcatgaacgcatcttggcacgtccggccggcgagatgttggaaaacttcttccgtgggattcgtaaacggaaaaaggcggctaaaaaagcacgacgtgaagctgctgaaaaaaattaggccgatggctggtaattgtggcgcaaatcatgtattatagtatttgccgcaaggccaaaaggcaagggtggatttacgaatcgtgtcaggtccggaaggaagcagcactaagtttgcttcatcttgtgccttttgtttttatgaaatgtaacagctcttagccattcggttgagagctttttatttaaattaaatattgagtgctagttttgaacgtgctgataggttggtttatttttatttacctattattatagtagtaatacgttatttgggtgatgcttttcaggctgatagttaaagccactgcttgttgaaggaataaccaaacgcctaacaaaggtggttaaaggcctgggcatcgactcgttggcaagtgcgcttagatgcttaatttgcataactgacactgatcgttagtggaagcagcacaaccaggaagctaactgttcaggacgtttaaacaatggcttataataagtaatgataaccaaagtatgactgatgtaagaaaggaagaatcgcatgtatcgggcactatatcgggtttggcgtccccaacgctttgatgagattgtcgggcaacagatgattacccagacactaaaaaatgccattatgacccaccagacgagtcatgcgtatctgtttaccggtccccggggaactgggaaaacgtcggcagcaaagatttttgccaaggcaattaactgtcaccatcttgttgatggggaaccttgcaatgaatgtgagacttgtacggcgattaccaaggggcaactaaatgatgtcatcgaaattgatgcggcttctaataatggcgtggaagagattcgtgatattcgggacaaagcgaagtatgctccaacgcaagcggactataaagtctacattattgatgaagttcatatgttatcgactggcgcgtttaatgcgttgctcaaaacgctagaagaacccccggctaacgttatatttatcttagcgacaacggagccccataagattccattaacgattatttcacggacgcaacggtttgattttcggcggattacggctaaggatagctacgatcggatggtgtacatcctcaatgagaaggatgtgacctatgatgaaaaagcgctacgcgtcattgcagcggctgctgaaggtggaatgcgggatgctttaagtattctggatcaagtaatttcgtttggggataacacggttacgttggatgatgcgttaatggtgacgggaagtgtgaccaagcagttgctggctaactatgtcagtgaggtcaccgaccatgatacgaagccggcactagagacgatgcgacaaatcttacaagaaggtaaagatgcgaaccgtttcattgaagatttgatcagttatacgcgtgacgtgttactctatcaacaggcccctgaaatggtcgatagtgtggcgatgggcgaggatgatcaacaatttgaagcatttgccaagcaaatcgatgctgaagtcctgtaccaaatggtcaagacgttgaacgatattcaacaacaaatgcggttcacgacgcaccccgacgtttatttagaagtgttgacggtcaagctagctcagttggatggtcaagcggccgttcaaccggtagctgcggcaacggtcaatcctgaagatcccactgtgcataaactggcacaacaagttgaacagttgcaaagcgaggtcaaaacgttacgttctcaaggtggtagtatcactaaacctgcaccggctaagccgcggtcgagtaatggcccggttgttaagaaggttaatgtcagtcagatttatcctattctgggagcggcaacgaagaatgatctcattaaggtgcgcgatgtttggactgatttgatgaatattttgagtgtgacgcagcgggccctaatgcacgtggcccaaccagttgcggccagttcagaaggtgttgtggttgcgtttgactatgcgtttgtttatcaaaaagcgattgatgaccagaccttgatcgatgcactcggaaatggtttggatcggctgatgggacaggcacccaagattgtctgtgtgcctaaagaacagtggccacaaattcgtaaggattatttggccactcaccagccaggaggtgcaacatcagagcaacaagcaccggccaaagaaccggtcgttgaagaagctaagaatatgttcggtgatttagttgaagtacagccggactaaagacgaaaggaactgataattatgatgcgtggaatgggcaatatgcaaagtatgatgaaacaaatgaagaagatgcaggcgcaaatgacagccgaacaagcggctttaaatgaacaaaccttcacgggtgcggcgccagacgacatggtcaaagtcacttttactggtgataagaagatgaaggatattacgattaaccctgatgctgttgatcctgatgatgtggatatgttacaggacttagtcgttgctgcggtgaacgacgcattgactaaggtcgatgaacagacacaaagtacaatgggaaaatatactaagggattacagtaaaaacgaggtaagtacatgcagtatccagaaccaattgctaagttgattgatagttatatgaagttgcccggcattggtggcaagactgcgacgcggctggcgttttatacaattgatatgaacggtgatgacgtcaccgagttcgctaagtcgctgattgcggccaaacgggacctgcatttttgtagtatttgcggtaatatcaccgaagatgatccgtgtgtgatttgtaaggataagtcgcgtgatcaaagcaccgttctggttgttgaagaggccaaggatgtcatggcaatggaaaagattaaggaatacaacgggctgtatcacgtcttacatggggtattgtcacccattgatggcaaaggtccggaagatatcaacattgccagtttattgaaacggctacagcaaaatgaagccatcaaggaagtcattattgccaccaacgctacgcctgaaggtgaagcaacagcgatgtacatctcgcggttagttaagccggcgggaatcaaagtgacccgattggcgcacggtttgtcggttggtagtgatattcaatatgcggatgaaatgaccttattcaaagccgttgaaggtcgccaagaaatgtaattggaggtgccaccatgtttaaacgtaaacagaagatcaagcatcccaaggaagtttttgatgaacagttattgtcgaccctgaatgccgctaagttggactgggaccgtgcgaagcagaaccaagaagcggtttatgataataatacgagtgaactagttacgcagaccgccttagcgcgtgctaagtatttatatctgtatcgtgaagcacgtttacgtcaagttcatgggcagacgattcagcgctcggtcgttgataaatagactgttagtgatttaagagataacttgtttcaaaataaagacgcacgtcgttgatttttgtaaatctacggcgtgcgtttttgatttagaaccctagcattattttaccagttaatctgtcatgcattgtgattaagacatgctaggtgcggcaattggaatagaagatgtgtatctactaatgaataacaaactaaaatcggtatttatcaatcgtgggtagtactacctaataactttttagcaattcaccgaataaatcatcaaaaccacaattggtagtagccgacccacgtaaaaatcgtgaaaaagtaccctcactagtggtaaccgtattagacaggtactcaaaaatcaagtacaattgctacatataagaaaatagatgggattgggaatgttgacaggaaaattagttacttttgaagggccagacggtgccggcaaaacgtcagctttaaacgcgattgtggccaaattacagccacaattaggggatcgcttagttgtgacgcgtgaaccgggcgggaatcaaatctcagaagcaattcgaaaaatcattttagaccgtcataatacggcgatggacgaccgtacggaagcgttactctatgcggcagcacggcgacaacatatcgtccaaaccattcaaccagcattgcagaacgaccaacttgtcttgtgtgatcgctacatcgatagctcggtcgcttatcagggggctggtcgtggtattggggaacaagcggtttatgatatgaatcagttcgcgaccgcggggctaaccgcagatttaacgttgtattttgacgtagatgctgccgttggattaaaccgcattcaacaacatcgccaaaatgaaattaatcgcttggacgtggaagccttaagtttccatcaccgggtgcaagcagcgtatttgagattactggctgatcatcctgaccgtatcaagcgcgtcgatgcaagtcagccattggaccaagttgtgacgcaggccttagagattatggcgtcacagttaccggcttatgtggcatccaagggaggggaagaccaatgaaattaattattgcaatcgttcaagataaggacagtaaccggttgagcagccagttcattgaagccaatgttcgggccacgaagctctcaacgacggggggcttcctacgttcaggtaataccacttttatgatcggtattgatgatgaccgtgtggatgaagttttagccatgattaaagaaacgagtcatgcgcgggaacagtttatgacaccaccagtcaatctagacgtgacgatggatggcgcagctgcctatccagttgaagttcaagtcggtggcgccacggtctttgttctaccaattgaacaatttcaccaattttaatgaaggatgattattaatggcaacaaccgagtcatttgcgcaaacgttagcggcgaaacagccccgcttattagcggcatttaaacacatcatcgcccagaaccatctggcccacgcgtacttattcgcggggatggaaggcgctggacaaccagaactggcccattggattgcgcaacggttgttctgcctgcatattaatgatggtgaaccagatggcacttgtgaggagtgcgtccggattgctaatgggtcgcaccctgatattgtgacagtggctcccgagggtcagcgaattcacgttgatcaggttcgttacttaaaagctgaattctctaagagtgcggtcgaaggtaaccggaaactgttcatcattaatgatgcggagaagatgacagcgagtgctgccaatagcttattgaagtttattgaggagccaagtggtaacgtcacggccttgttattaacgactaataagcaactgatgctaccaacgattatttcacgaacccaggtgatcgaattcccaccattaaatgcgcaggcgttacagcagacgtttgaacaggccgggattgcgccaaaccaagcgcagatgttacggggcctgacaaatagcgtgacccaggcgcaggcgttgctagcggatgattggttaccacaagctgcgcaagcattgtggcggtggtttgaccaggctgttaagggtgatccacggagttttgtggctgtgcaggtcaatttagttggtttggctaaggacgctgatcatcagctggttatgttggatttaattgcggccttgttccaagatctattgcaattacattttgaggtggcaacgacagcgttaacctttggtcagtaccaaaaagaattggccgggttaacggctgaagtcagcgatgagcagttgattgcggcgacagaactagctttaacggccaagcgccagctagctagcaatattagttttcaaaatgtcttagaaggcttaacgttaaagttatggccgatttttcaaacaaacgcttaaataaaggaaaacgagggtgagcgcgtggataagcgtgatttatacgatagtttcggtgagatggaacaacagatgcaacaaatgctagacaaaatggctaagttacgcgccgatatgacaacggtgttagagaaaaacgcggaattggtcattgaaaatgaacatttacgtgaacacatggtcgaaattgaaaatgaattgccgaaaaaagcggctagcacgaccacgctctcaaagtcacggcaaaacttggaaaaactctatgatgagggcttccacgtctgcaaccagttttacggcaaacggcgtgacgatgacgaatcctgcgttttttgtttggaagtcatttatggtgaacgtgaacgcgcatagtcgaaaaagtctgggagtagtcccagactttttgtgcttttcaccacgagtcactcataggaacaagtcacggtcgagaggattgttaggaggacgttttggaaacacaacaaagttttgcagatcatgcgggtatcgggaccttgtacttagtaccgacgccaattggcaacttacaggatatgacttatcgggcagtggcgacgcttaaaacggttgacctaattgccgcagaagatacccggaatacccaaaagttattgaatcattttgaaattacaacgaaacaaattagctttcatgaacataacacccaagaacggattccccagttaattgaaaaattacagacgggcgttaacttagcacaagttagcgatgcggggatgccgtcaatcagtgatcccggcaaagaacttgtggcagcctgcattgccgcgaatattccagtcgtgccactaccaggtgccaatgccggcctgactgcgctgattgcttctggcctagtgccacagccattttatttctacggctttttaccgcgtaagaagaacgaacaaaaagctgatttagctaaattggctctgcgacatgaaacggtggtcttgtacgaatcgccattccgtgttgccaagaccttgaccctcctagcgaccgtctgtgaagggacgcggccaattgtggcgtgccgggaattgactaagcgttacgaggagtttgcgcgcggaaccttgactgaaatggtgacgtgggcgcaagatcatcagttaaagggcgaatttgtccttttgatcggtggtaatccggataaggatgaaccagaaacaatggacgaattggcacagttgccagtcaaagcccaagtcgaagcgttgattgcagccggagataagcccaacgtggccattaagacgattgcgaagcgacggaatattccccggcaaagcgtttataatcagtttcatgaactaaataccaacgatgaggagtcttgatgaatggcaactttaggcgcaaatgcgagtctttacagtgaacagcaccggattacgtattatgaatgtgaccgcactggtcgcgcaaccttaacgacattaattgatattgccgtactggcatcagaggatcaaagcgacgcccttggtttaacgacggaaatggtgcaaagccatggtgtcggttgggtcgtcacgcaatatgccatcgatattacacggatgccccgccaagacgaagtcgttacgattgccgttcggggtagtgcttataatccatattttgcttaccgtgaattttggattcgggacgcagatggtcaacagttggcctatattacgagtatctgggtcatgatgagtcaaacgacccggcgaatcgtaaaaattttaccagaactggtcgcgccgtatcagtcggaagtcgtcaagcgcattccgcgcttgccacgaccgattagttttgaagcgaccgatacaacgattacgaagccgtaccatgtccgcttctttgacattgatcccaaccggcatgttaataatgcacactattttgattggctcgtagatacgctacccgcgacgttcttgcttcaacatgatttagttcacgttgacgttcgctatgaaaatgaagtcaagtacgggcaaacggtgactgctcatgcgaacatcttaccgagcgaagtggccgatcaggtcacgacgagtcatttgatcgaagttgatgatgagaagtgttgtgaggtcacgattcaatggcggactttaccagagccgattcagtaattcgctgggttggtatttacactagtgtgttaatgatgtggtcatgagcgacttggtcgattagaacgcacgtttttattagagtcgctagcgattcagtatgctatgattaatacatccatacaggggaggttcattatgtcaattttagttttagggggagctggctacattggttctcacatggttgatcggttagtagaacacggtacggacgtcgtggtcgttgataatttggtcacgggacaccgtgctgctgttaattcggcggccaagttttatcagggtgatttgcgggatgcggattttttgaatcacgtttttgatactgaggatattgaagctgtcgtgcattttgctgccttttcaatcgtaccagaatcaatgagtaagccactgaagtactttgataacaatactggtgggatgatcacgttacttgaaacgatgcaggcccatgatgtgaagcaaatcgtcttctcatcaacggccgctacttatgggacacctaagcagattccaattaaagaaactgatccacagttaccaatcaacccgtatggcgctagcaagttaatgatggaacagattatgcactgggcggacgtcgcctatggcattaagtttgtcgcgttacgttactttaacgttgcgggtgccaagccagatggcagtattggcgaagatcatggccccgaaacacatctggttccaatcattttacaagttgcgcaaggaaaacgcgatgaacttaaaatcttcggcgatgactataatacgccggatgggacgaatgtgcgtgactatgtgcatgttatcgacttagctgatgcacatatcttggctttgaagtacttggctgcaggaaatgaaagtaatgcctttaacctgggttcttcaactggtttctctaacaaacaaatgttagcggctgctcgtgaagttaccgggcaaccaattccagctaagctagcgccacggcggcctggtgatccagactcattggttgcggcgagtgataaggcgcgtgacgtgctaggttggcaaccaaattatgacaatgttaacgatattattgaaacagcgtgggcttggacgcagaagcatcccaatggctacgatgatcgtgactagtatcggttagctgataattgaaagcggctttgaaatctcgtcaatagatttcaaagccgcttttgtggtcgtcaaaaaaggtgcatgtcaggattgagtccttggcacgcaccttttagattgatcaatgcagttagcggtgaagttgttgataatcaccgataattgttaagagtcgttgaatatcagttgtatcaacatcaccgatggtaccaattctgaagctagggatatttgaaaccttcccaggataaatgacgaagccgcgttgcttgatgaactgatagaagtcagcaaaatcaaagtcgccgttcgggtatttgaatgacgtaatgatgggcccttgaatggctggatcaatcactaattcaaaacctagcgcttgtaagccgtcgctaaggagttgttgactagcacggtaacgttggtagcgtggtgtcacgccgccttctgcttgcaattcaatgagtgcttgcgcaaaggcatgtaccacgtgggttggcgaagtgaagcgccattttcctggttgcttggtcatggcttgccattggtcgtagagatctagacaaagtgaacgagcgttgtcagcagtgtgggccaaggtcgcttgttttgcaatgatgaacgcaaaaccgggcacgccttgcacacacttgttggcactactaatcaagtagtcacaatccaattcatcaatgctaatcgtgacgccacctaaactggacatggcatcgatgatcgttacgatcccgtgttcatgcatgatgggcattaaagcttcgattgggttgagaatcccagttgtcgtttcgctatgaacggttgcgaagtgggtaatctccggatgatcagctaaggttgcttcaatccgaaccggatcgacggcttcatcttcgttgaacacaacgtcgatatgtggaatatcgtaatattctgcgatttgactgattcgatgcccatatgcgccgttaatgccaatcattaaagttgcatcggtccgtggtactgctgtgccaatggtggcctcaacaccaaaactgccgcttccttgtagtaggacggtcgtatagttttctggattggcttgggccatagctaagatttgttgccgaatggtttcggtgacgtgccgatagtcactatcccaagtacaataatcaatttgcattgcgtccttaacactggcagtcgtactgagtggaccgggtgttaggagtcaataaggttgtttcataaaaatcgggctccttgtctgctaatgatcagtggcaaccggttgattgatttgatcaagcaatgccggtaattcagccatcgattgtaaaatgtaatcggcaccagcgcgttgataagcggcagtgacgtgggctcgtcgttcagcttgttcggccgggctaagggcgttgaaggctaactccgaaagtcccatgatgttgctaccatcaataatccctacagagactgcgtcggcgttgttgccttctaagatatcattaacggaatccccaattttcatgacggtcgttggatcagtgactgtgagctgttcagctgctaacgcaagcattgccggcgctggtcgaccaacaccgccagtttgttctgaagtgatgttgacggcgggacgatagccttgcttagctgcgatcggtaagaccagggctaacatttcagcgtcatagccggtggtcgtgccatagctgatattgtgagcggtcaaatagtcaattacagctgacatgccgggctttaattgtccgaattcagtcagggagctaagcaagattgccttgaagttgctaaagatttgattgcagtcgtcttcagtcggtaagacttggaaacgcgcctgccagtcgttttgaacggccggtaaatccatgattttatggatatgggtgtacttatctagtcccatatcttggcgaatctcagcttcagagatttgaataccaacgttggcaaaggctttttggaaagccacgatgggcgcccggctgccatagtcaatggtcgtgccggcccagtcaaaaattactgctttaattgtcattgatgaaaactcctttgaatttacttagttgttctttaagtagtggccacgtaaccgcatagaaaccagttcgagcacgattgcgacacccaagagtaggtagacaatcaaaccaacttcatggaaatcgaagtagaaactgccagccatgaagaggtagtaaccgatatcgtcagcaccagctgcagcaccaacggcgaccgcattggcaaagttaatttcaaaccggataaacgtccagctaagaagtgctggaatgattgacgggagaatggcctgaaaaacaattggccaaaaacccacgccactcgcctttaacgcttcaatcgtatcttgcgaggtttcttcaatactttcagaataagccttaaccaagtacgctacactgtggaaggtcaagccgaccacggcggcactagcacctaatcccatgactacggagtaaattaacacccataaaatcgttggaatggcacgaataaaggccatgactgctttaatactagtagctaaccaactgggtgctaagttacgggcagcaccgacggcaatgaagaaggcgattagcgctcctaacaaagttgtcaacatcgctaatgaaacactagtcattagggcccgtaagagttgccccagtgtgtcttgaccaacgctagggtgtaagaacatagcattcaggttgagacctaagctatgcaaagcgtcaatgatgttcaggttggcattattgagtgtgactaatgaatagacactgataagcgttaggccaatcataacggctcgcaggattttgcggggccgagtcaccaacgaaatcgaccgggttggtggtgctgacggttgaagtacttgtgttttgggttgactgttttcaatcatgcaattgccctccgaattcgattagatgtcaattctaaaacaatgactaaaatcgcaattaacaaaacaattagaccagcagcgtcatagcggaacgccttaaaatagtagtcaaagagaaaaccaacacccgtacccgtcaagagtccgaccaaggttgcgtcccgtaagttgttttcaatcatgtagagaatccaactagtcaaggtactagcggcttcgggtaacaccccacagaagacacattggaaatagttggcgccaacggcttgcagtgcttgaagcttttcggcatcgaggtcctcaatagtttcagtaaaggcccgtgttagatagcctagcgtcataaagaacagtgccaagaagcccgtaaagtcactctgtttaaaagaaaacagaagaatcatcgcccaagcgaccaccggaatattacgtaagagtgaagcaccaaaacgaataatccagcggaggacaggcgttggggtggtcgtcttagcaccgagaatcgcaaagatcagggcgaagagactagcgaccatggttgatgaaattgccacgagcaaggtccgccacagctgataaagaatcggtcccagataagaaatcgaacgacttgtcggaataaagttggtaaataaccacattaagcccgctggaatcttactgatcgaagcccacgcctgaaaattaacgagggccatggataagacgtagatgccaattaaaatgagcaaaacaactgataatcgcaaccgacgttgccgaaaaaagcgttgcggtgtcattggattagttttcattggcagccaccgccgttgattggtcaggttggcgataaatgtgttgtaagaccgcgtcgtcaacttcattagtggcgccttcgaaaacgatggcgccgctgttaatgccgacgatatggtcggtgtacgccattgcgatatcgacctgatgtagattaatgaggataatcagttgtttttcctttgccaatcgccgtagaatgtccatgacaatggtcgttgatttgggatctagggaagcaatcggttcatcacataaaatcatcttaggatgttgcattaatgcccgtgcgatcccgacccgttgttgttggccaccacttaattgatcgcaacgttggtaggcgtattcttttaaccctacttcgtcgagtagttgtagcgcctcttgtttttcggcgctactgtaaaggccgagcatgccagcaaccgttgatttagcgcctaagcggccatgcagaacattttcaagggccgttaacggactgatcagattgtagttttggaaaatcatgccgatatgatgacgaactttgcgtaattcagctttgttcgcttgacgaatgtcagtgtcatcgagcaaaatttgaccactatcatcgcggatcaactgattgatactccgtaaaatagttgttttaccagcaccagacgggccgatgatggcagttacttcgcccggtttagctgtgaagttgactgctttgagcgaatgcttattggaaccatatgttttatctagctgaataaccttgagcattggcaaatcctttcattgtgaactaatggtacgtggtttagtaacctactaacttatgcgttggcgcgtaccacttgtcggtaacattaactaatttggacttttctgatttcttagggaacatcattggtgtcttcgcatttggttcagagaagatctttttgttttgggcaaaggacttcgacgtgaactcagtggcgatcttcttttgatcatccttgctgagggccttggtattgtatacccatgggccttgttgaacaggcatcatggcaatgttaacgaccgacttgccggctaaacttgtaaatggcgcttcggcgttatccttaacagtgaaagttgagccgaccttgtcccatgatcccttggtaacgtttaagtatggcattaaatcagcatcatcaaaggcagcgacatccgcatcccccttgattaagttgaccgcggaaccctgatgagagccaccatagagcactttactaaagaatgatccgctttgagttaatttatcttggtcagcggttttgatgttgaattcacgtgagatttcagccgttggtactaagaagcctgaagttgaactgttggaaacataagacatcttcttgcctttgacgttcttaatactgtacttaccgttttcttcatactttttggcatctttttgttgtaccattaagtaggagttataagtagcgtctttcaaggtacctttagcatcagattgtgcggcaaaaggtacaacatctttgctcttgtggtgtgcttggatataaccgttagcccccatgtatgcgacttgagctttgccggatgcaattgcttgaatcgcaacgttatagtcggtcgtggtttgtaatttaaccgtcttacccgttgccttttcaactgcttgcttaatggccgtacgggaaccagcaaaactcttggctgattcgttaggatagaagaccaccgtgatggttttgctgctatccgtactgctaccaccagatttagcactggttccgctagcgcaacctgcgagtcctaaacctaaaaccgaaatgaatgaaagacctaataatgacttactaacttttgacatagtttccaattacctccaagtaattttagttacttgtgtagcataacaaggtattgtaaatgtgcggacaaggattagtgaagtatatgtataagttatgtaaataatatttacattcggttttcaattcagcgattggtaagtatgagtggaaactggtcaggatagttgttgattgtttctggattgaattggttggttactaccgtaaagctttcaaagtaagtaaattatgataagatatgtgaagtaattcaaaatgaggagttttttaaaattatgaagttgttggcgattgatacttcgaatcggccattgagtgtcgcggtattagaagatacccagatcttggccacaacgaccactaatgttggccgtaaccacagtagtacattattaccgattattgaacaagccatggctcaagctaaattggcaccagctgatttagaccggatcgtcgttgctgccggaccagggtcgtatacggggttgcgaattggcgtgacgactgctaaaacacttgcctttacattagataaagccttagttggtgtatcgagtttggccgtgttagctggcaacattgtgacggaaggccaattagtggcgccgttatttgatgcgcgtcgtgacaacatctttgccgggttatatcggattaagaaccagcgcccagttgccgttatcgctgatcaacatatcagtgtggccgagtggggtcaacgattagctagttatgatgaaccaattacctttgtcggcgcggatgtcgatcaatatgcggatgctttgcagcaatcgttagctaagcagttcgttcatgcagccccacaacttgacttgccccaagccgtagtactaggtttgatgggtcgaacgctgacacccgtgagtgaaattcataactttgtgccaaactatttgcgtttaacgcaagctgaacgtgattggcaagccaagcacccagaaaaggaacatgcgccctatgttgagaaaatttaaggagtactttcaaaaaatgaccaccggtggcaatcagcgccgccaacgtgtattggccattcaaaatcacatcgttaaagtgggcgaagtcaattactatgtctcacgcgcactgattaccgatgtgcccgagatgctagccattgaacgggccgtatatgcgggacagacaccgtgggatgaaaatgcgtttaagacggaacttcgccgacagagcggtcgtttctatattgtgatgcgtcatgaagatcgcctcgtcgctttttgtggttgtgtctttgatgatcgccgccaagatgcacatatcaccaatattgctgtacatcccgatgttcaaggccaaggactcggccattttatgatgcaagtcatgatgaagcgggcgcgtaagttgcattaccaaacggtgacccttgaggttcgttacagtaatacgattgcgcaacaactttaccgcgatttagggtttgaaaagactggtatcaagaaacggtactattttggcgaccatgaagatgccattgatatgacttatcgcattccggtagctacggatgactgaacgacagcttgtcgccagtacgcagcttgacgcgggtcgggccgtccaagtttgttaccagttagcgacattagcatatcccggtggcgcaccttggcggcaagcgacgtttgcggcggacatggcgttaccaacggtacactatgatttattacggtggcaggatgaactgatcgggtttgtcagccgctcaacagtgcttgatgagaccgaaattacgaatattgcaattgatccggcctatcagcgtcaagggcatgcgcggtggttattaacagcctgcttagcacaattatcggcagggtccgtattcctagaagtccgggctagtaatctcgccgctcagcgcttgtatcagcaatgcggctttgaccagattgccacgcgtaaggaatattatcatgatcccgaagaagatgcgtggatcatgcgtaaaatgattaattaaaaggatgggaaccgtggaaaaacaaaacttgattttagcgtttgagtccagttgtgacgagactagtgtggcagtgatcaaagatggccatgagattttatccaacgtgattgcaacgcagattaatagtcacaaacggtttggtggcgtggttcctgaagttgccagccgtcatcatattgaacaaattacaatttgtattgaagccgcacttcaagaggcacacgtgacgtatgctgaccttgatgctgttgccgtgacgtatggccccggtctagtgggggcactgttagtcggtgttaatgcagctaagacagtggcatacgcgcaccaattaccgctgattccagttaaccatatggccgggcacatttatgccgctcggtttgttaagccattcgaatttccgctaatggcactattagtttctggcggtcatactgaattggtctacatgcaagcagatgggcagtttgagattattggtgagacacgtgacgatgcggctggtgaagcttatgataaaatcggtcgggtattgggtgttccatatccggcaggtaaagtcattgacgagatggcacatgcaggtcacgacactttcaaatttccgcgagcaatgattgatgaagataattacgattttagttttagtgggctgaagagtgcgttcatcaatacggtccatcacgcagatcaaattggcgcgactctggataagaacgatttagcggctagctttcaggccagcgtggttgatgttctgatgagtaaaacgttacgagtcctcaaacaatatccagttaagcaattagtcttagccggtggcgttgcagctaatcaggggctacgtgaacggttacaacaagatttaccaaccgcttttcctgacaccgaactaatcttagcgcctctaaagttatgcggtgataatggtgccatgattggtgctgcgggctatgttcaatatcagcatcaccaattcggtgacgcggcgctgaatgccgatccaagcttagaatttgattggatgccaggtatgttgaagtaatgaagcagttataaacgggtgtgaaaagtcagtccttttcacacccgttttagtatcttttcattaattatgattaaaagaggatgattcctagaatcaaaaatgaccagcttaagcccgctggaaatagttcaagttagtgtaaacttgcttagttagttcgtcctacaccgacctccaggcatttctgccaattgccggaacgtggtgggcacagatttgagccgaaaaatcacgtctcaaatactggcctttcactaaccaagcacaggacgcttgctaagtgaaatttcaccactgggcattgtcagaaacgccttccagtcggaatagcgttcgaatggctgataggggcgtactcaacttttgctggatttgtcgttgtttttcataaacgttaattttatcaatcaactgtcagattgaaaaggtcttgtgataactcactatttctgaattaccgtagtaataattgaatatttcgaaaaagtggagaaggcactctgatatttgacttaaagggttcagtatcaaaatagccaacgacaaattgtaccgagttcagtggccgttcatcagccattcgagcggcatcccgactggaggggctgggtgacaatgctcagtagccaaattattcttagctggaagtgggttccttccggcttagaataagactcgtatttgagaccgggcgggttgtgtacggactcaaatcgacgtcggcttacgttccagcaattgtcacccagccccggaggtcggaatcggacgcgcattgctgacgaacaggaacccacctaaccggcacctttcaatcatgatttatgccgcggataggggcaaaataatagtcgcctcaagaattatattaattcttgaggcgactattatttttatctgatgagtcattggaaaattagctcaattcttctaaagcttcagcttgttcggtccattcggtttcaacttgttcttgttgagtattgatggcttcaagttctttttgtaggtcttgtagtttaccaacatcggccgatacttcaggttgcgccatttcagtttgaatctgtgtggcttgttcatctaaggcagtcatctgttcttccagggcggtaactgagcgctcgagcttgcgcttttcacgttgttgctgcttgctggcttggtaattttgctggcctttggagcggggagcagcagttgtggcactggttgaatccgctgcaccggcttcagcagctttttcggccgcttggctagcagccgcagccgctatttcagcttgttcttgtttcttgtcgatgtagtagtcgtaatcacctaagaagagttccgtaccttccggagaaacctctacgacactcgtggcgacttggttaatgaagtagcggtcatgtgacacgaataaaagggtgccgtcaaagtcgttgagggcgacttccaaaacttcacggctatcgatatccaagtggttagttggttcatctaagattaagaagttgtcattttgcatggcaagtttggtcaacagtaaccgggcccgttctccaccagatagggcatgaacgggtttatcaacatcttcaccagtgaagagaaaactgcccaaaatggtacgaatgtctttttcaggagtagtgggatgttcatcccaaagttcaccgaggacgttttttttgtcgtttaaattacgttgctcttgatcgtagtagcccgtaacgacgttggtgccaaaaacggcctggcctttaatgaatggaatctgtcccaaaatactctttaggaaagtcgattttccaataccgttcggtccaacaatggcaatagcttcatgtttcttaatattcaagttgtcgggttccgaaagaatctgaccatcatagcccacggctgcatctttgacggtcaacacaatgttgccgctttgtttagccgcatgaaagccaaagtgggcagtcttctcgtcactatcagggcggtcaaggcggtccatctttgctaactgcttacgccgagcctgggcccgttttgtcgtagaagcacgcacgatgttacgattaacaaagtcttcaagcttgctgatctccgcttgttgcttttcataatgtttccattgtgcttggattcgagccgctttttcttgcacaaactggtcgtagttgccagtgtagtgcaccatttcatggtgtgataagtcatagacttcgttaacgacccggtctaaaaaatagcggtcatggctaacgattagcagcgcaccagagtaagactggagatagctttccaaccaagtaagggtttcgacgtccaagtggttcgtcggttcgtcaaggataagcaagtcccgtttttcaagtaacaacttggccaaggccaactgggtcttttgtccaccggatagtgccgtcaccgacttatcgtacacatcggcgtcgaattggaagccgtgcaacacgccccgaatctcagcttggtagccgtacccgtttttttgttgaaattcagtttgaatctgatcataggttttcagggtctgttgataagcctgctcatcattcatgattgcggggtcgctcaattgattttcgagctggtgcatccgtttttcgatggcatgtaactcagcaaagacactactcatttcttcccaaatcgtattgttactatccagtccttggtcttgcgccaagtaaccgattgttaagcccttgcgcattgaaatctggccttcgtccggtaccgtttcgccggcaatcattttaagtaaggttgattttccggccccgtttcgaccgacgagggccacccgagcgtgttcttgaatatccatttgtacgttatcgaacaagacatcggcgccaaaacgccgcataacttgctgtacttgtagtaaaatcacgctttattaagctcctttcacatttaattcgtgacataattgtagcatattgtaacggcctgacccaattattcggaataataagtaattattatttcacaaagtcacgcgttatgctagaatagtgtcagcaaattcacaagcttttaattaggaggacacgtccgaatggcagaaacaaaaattccacgggcaacggcaaaacggttaccgatttattaccgctatttaaatatcttgctagatgcagataagaagcgggtctcatcgaccgagttgtccgaggcggttaaagtagattcagcaacgattcggcgagatttctcgtattttggggcgctcggcaaacgagggtatggatacgatgttgaaacgttacttgcatttttcaaaaagattttaaatcaagacaccttaacgaatgttgctttaattggggtcggtaatttgggccacgccctactgaactttaattttcacaaaaacagtaatgtccgcatctcagcagcatttgatgtcaacgaggcgattgccaatacagtccaaagtggggttccagtatacccaatgacggagctcaaaaagcaattgatcgaacaacagattgagattgctatcttaacggtgccaaccacggttgttcagaaaattaccgatgacttggttgatgcaaacgtcaaaggaatcatgaactttacgccgttacgaatctccgttcctgagacagtacgggttcagaacgttgatttgaccaacgaattacaaacattgatctacttcattgaacattacggtcagcaattaggtgacaatggtaatgacgatgaaaatgagactgaagattaataactcgctttatctttgaaattaaatggctataaaaaggcttctctgaattattcagggaagcctttttaacatacttagatcacgaatcattgattgtaacgtataaatattcggtgaaaattaacgttgaaacgctaggttagcgctacctagtaatgatactagtgcagtaagcctaataatgtgggtaacacaaccgatgcgttcattaggatgtgagccgtcatcgatgtttgaatccgaccggtgtgctggtataaccagcagaataataacccgataaaggcatagaggataaagtgaccatccgcatgtgcaaagctaaatagcacactagaaatcaaggccgccccaatctgaccagtaaccgcacttagattgccaaagataactttgcggaagacgatttcttccataatcggggcaccgacaatgatggctaagaagaaagcgggatattgttgcccaacagttaagagggtggtcgtgttggttgacgctgttgactgtcccagtaaagccgtcatttttaaaatgatgacttgaccaacgatgactaggacaagaccgatcaatccccagatgaacgtcatgaaccagttacttggttgtttttcaacaacgttttttgtccgcatgcgactcgccaaccagatgagtaggattgcaccgactaagtagtcgaccgtttgaatcacgaatacttgggcccctagctgatggaaagcagtcacaaggacgctcggtagtgcgtaaataataaagtagatgataagaataaagattgattggcggcgattaaccatcaagtcacgtccttttaaaagtttgatttaagatttattgatacttcaatagtattcattatagtcgatttgacattctttgactaataattgacaaatcacttgcaatcttgaattaaaatgatatagttgacaatgtaattagcacttgaggttgaggagtgctaaaaaagaataaatggagggattcacgtgttaaaaccattaggagatcgcgttatcttgcaacaacaagaagaagaagaacaaacaattggcggtattgtcattgccaataacgctaaggaaaagccccaaagcggtaaggttgttgccgtcaatgacggtcgtgttttagataacgggacaaaagttgaccccagcgtgaaggtcggcgatcaagtattattcgataagtatgccggtaccgaagtcaagtatcaaggtgctaagtatttggtattgcacgaaaaagatatcgttgcaatcgaagactaatccatttaaattgcgcaacttaaaataaattaaattcatgaggtgaatagagataatggctaaagaattaaagttctctgaagatgcacgttcagcgatgctaaaaggtgtcgatcaattagctgacacagttaagtcaacgttaggtcctaagggtcgcaacgttgttttggaacaatcatatggttcaccaacaattactaatgatggtgtaacgattgctaaggcgatcgaattagacgatcatttcgaaaacatgggtgctaagttagtttctgaagttgcttcaaagactaatgacatcgctggtgatgggacgactactgcaacggtcttaacacaatcaatcgttaatgaaggtatgaagaacgttacggccggtgctaaccctgttggcattcgtcgtgggattgaagaagctactaagacggcggttgactcattacacgctatggcacacgaagttaagacgcaagaagatattgcgcaaatcgcttctgtatcttcagcaagtgaagaaactggtaaattgattgccgaagccatggaaaaagttggtcatgacggtgttatcacgattgaagaatcacgtggtgttgatactagtttagacgttgttgaagggatgcaattcgaccgcggctacttatcacaatacatggttactgataatgataagatggaagcggatcttgacaatccatatatcttaattactgataagaagatttcaaacattcaagatattttaccactattacaatccatcgttgaacaaggcaagccattgttgatcattgctgatgacatttctggtgaagctttaccaaccttagtcttgaacaagatgcgtgggacgtttaacgttgtcgccgttaaggcacccggttttggtgatcggcgtaaggaacaattacaagatatcgctatcttaactggcgggacggttatcactgacgaccttggccttgaattgaaggacacgaccatcgatcaattaggtcaagccaacaaagttacggttactaaggataacaccaccattgttgaaggcgctggttccaaggatgctatctcagaacgggttgaatttatccgtaaccaaatcggtgaaacaacttctgactttgacaaagaaaagttacaagaacgtttagctaaattagctggtggggttgccgttgttcgtgtcggtgccgctactgaaactgaattgaaggaacgtaaataccggattgaagatgctttgaacgcaactcgggccgccgttgaagaaggctttgttgctggtggtggtactgctttgattaacgttatcaaagatgttgctgcattgaaggaaactggtgacgttcaaactgggatcaacattgttaaacgtgctttggaagaaccagttcgccaaatcgctgaaaatgctggtttggaaggctctgttatcgttgaaaagatgaaggaacaaaagccaggtgttggtttcaacgccgcaactgatgaatgggttgacatgatcaaagctggtatcgtggacccaactaaggtaacgcgttctgctttacaaaatgccgcttctgtttcagcccttctcttaacgactgaagccgttgttgctgaaaaacctgaagaaaatgcaccagctgcaccagccgcaccaaacccaggtatgggcggtatgatgtaaacaaatcgtaacattaagcacttactcggctgagtaagtgcttttttagtgctgttagggtgtgaatcaactagaataaaggtattgatttatccatattagagcggtaggattagtcgttaacgcaaaatgtgggtgcggtgaagcacccgacatttaactggtagtatttggcagggtaaagtagtagaatctactttgactcagtttactttgggataattattttggaataaaggagttattatcatgtggcgttatttaaagcggttagttattgggaaaccgttaaaaaccatggacgagggtgggcaagcactcaccaagttcaaggcactggcgctgctatcgtcagatgcgctatcatcggtggcttacggtactgaacagattacgaccgttttgattacactttcagcggccgcgttgatgtatcaattgtacgtggcggcgcttgtgttagtgctgttgtttgctattacgatgtcgtaccgacaaattattcgggcttatccatctggcggtggcgcctacgtggtggcaagtacgaactgggggcggccagccggattagttgccgggggatcactgctggttgattatatgttgaccgtagcggtttccgtcacttctggtactgaagcaatcacgtcagcgattccggcgctagctaattatcaagtattgattgccgtactgattgtcatcgccatcatggcgttaaatttgcgtggaatgcgcgaatccgcatcattcttaacgtttcccgtttattttttcattattatgattatcggcatgattctatggggcgttatgaatattgcgagtggtaacttaacttaccacgcctccgcagcagttggagcaccggttcaagggatgaccttggtgctgttcttacgggccttttcttccggttcgtcttcgctgactggggtggaagcaatcagtaatgcggtgccaaacttcaaacgaccgaaacgcaagaatgcggcgaacacgttagcaattatgtcattagtcttggccgtcttctttggtggtattacttatttaagttattacttaggcattaaaccacaagtagacaataccgtcttgtcacaaattgctacggcggtctttggtcacggcttattctactacttgttacaattatcgacggcgttaattctggccgttgcggcaaatactggtttttcagcctttccaattttagcttataacttggctaaagataaatttctaccacatgcttacatggatcgtggggaccgcttgggctactccaatgggattatctcattggcggtcggggcaattgcgttgatctttatctttcatgggaagacgacgcttttgattccactttatgcggtgggggtctttgtcccatttactttgtcgcaatctggtatgattattcattggttccgcgaacgggggcaatggtggtggatgaaggcggcggtaaacttacttggggcgttgatttcgattctcctagtgattttcctattcttgctacatttcggcaatgtttggccatacttaatcgttatgccactcttactgtacatgttctaccgaatccacgtgcactataaccgggttgcggcccagttacgcgtggttgccaaggaaaaagcggcgattcatgattatgacggtgcaacggtgatcgtcctcgtctcgaatgtgacgcgggtaactgctcaagcagtcaactacgcgcgatccatcggagattacgtcattgcgatgcacgtgtcctttgatgagaaccctgaaaaggaacacaagacggcggcagagttcaaagagaccttcccagacgtccgtttcgtggacatccattcgtcgtatcggtcgattgcaaccccgacgttacgattctgcgatgtgattgctaaacgagcagcggaacgcaacttctcgacaacggttcttgtcccacaattcgtgccgaagaaaccatggcagaatattttgcataatcaaacgagtctccgattacgagcggtattaaattctcgtgaaaatattattgtttcaacttataattaccatttaaaagaatagtgacttagtattgaaacccggtatagctaccgggtttttatttttgtgtcataatatgagtaactaaggttataatttagatacttaatcagcccagtgaccggcaaatgtgaacgaattgtgttgcctttactaagttttagtgaagcgagttgtcaagcgtcactgggatttgtataattatcgtaatagagtgagaagggagttacgcacaaatgatcagatttgaaatcctagtaagcctagtggcgaccatgatactttctgcgatcttgacgccgtttgtgcggaaacttgcatttaaaattggtgccgtggataaaccaaatgtacgacgggtcaataaaattccaatgccgacaatgggaggcttggctatttttatctcttacaccgttgggacgactgtgttgtatctcatgcaccagtttcccagtcgcatttttttcgcactactcggtggtgagctgatcattattgcgactggtgttatcgatgatatttatgagctaaaaccacggcaaaaaatgttagggattacgttagccgctttggaggtctactttattggtggtatccgaatgacgactttcacgttcccgttgctggggctgattcactttcagtggctgagtttaccggtgactttactgtggatactggctatcacgaacgcggtgaacttaattgatggactggatgggctagctaccggtgtttcgattatttcgttgagtaccatggggatcatcgggttgttcttcttgaatgctaatatgttcgtttcgttgttgatttttactttagttgcggcgatgattggctttcttccgtataatttctttccagctagaatttatctcggtgataccggttcgttgtttatcggctttatgacggctgtgttctcattatttggattgaaaaatgtcaccttaatctcagttggtattccggttatgatcctgggagtgccaattacggatacggtgtatgcgatgattcgacggatcctgaataagaagcccatttcgcaagcggataagcatcatttgcaccaccgcttgatgcaattaggattgacccatcgacagactgtgatggtaatttatgggattgcacttattttctcatttatttcattgctctatccgatctcatctatttggggttctgtgttattgacgattggtttattatttgggctagagttattcgttgaagcaatcggattagctggtgacaatcggcaaccgctactggattggatcaaacggaccgtcgcgcgtttgacctccaagagtaatcattaaaaaccaaataaatcattgaaaattattaaagtgttacaggcatctaccgtgtgattagcggtgatgcctgtttttagttggtcatcagttggttcatcaatcttaactttaccaaaactatacaagcaatttacacaatcgtcattcacaatttacaaacgattagtaatattaagcatgttccgaagcaatcaattacgtgtaaccgtcggacggtgatgttgctccatcactagtcgtagcactcctacccagttttgctatgatggttgccgggttggttgcttaattttgatagtcaattgaagaaggggagtttcaattatgaaaaaagcactgacactcggcgcattagcagtaacgatgaccattttactagctggttgcggcagtagctcagccacaagtacgaagagtactagtagcagtagtggtagttccaagactactaagatcgttgcaactggttcaaccgctttacaaccattagtggaacaggctggacaggcttaccagaacgaacatgctaacgtgaccattaacgttcagggtggtggttcaggagcaggcttaagtcaggtggcgaagggttcagtcaatattgggaactctgatttatttgcacaggaacaaaaggggttagacgccaaagggttagttgaccataaagtggctgttgtggggatggcacccgttattaataaggatgccggtgtcactaatatttcaaaagaacaacttatcaagattttccaaggcaagatcactaactggaaagatgttggcggtaaggacgaaaagattaccgtcgttaaccgtgctcaaggtagtgggacccgggcgacgtttgaaaaatggggattagacaacgcgaaggtcgcaactagccaagaacaagattcgaatgggaccgttcaaaaaattgttagcaccacgcctggtgccatcagttacttagcattctcatacgttaagagtgacgttcaggcgctttctattgataacgtcaaaccaaccgaagctaacgtagcgacgaacaagtggaagatttgggcttatgaacacatgtatactaaggggcaaccaactggggagttgaagaacttcttaacttacatgacttctaaagccgttcaaggtagtttagttgagaaattaggatatattccattgacttcgatggaggttgatcgtggccaatctggtgcaatcactaatttaaaataaataacagacaaaaagtcgagcgatagctcgactttttttatgggccgcaattagtgcaacgcggactttaacaatgaaaaaacaaatcatcggctcaagtgctgggtgttattgttaagacgagttggctgtttcgattttgactgccaatcaaagtttgtgaggctcccaattatatataaccagcaatctagttgccaggcgtagtgaccggaatttctgtaaattgttcaccttgctccgaaaaggtaacttgaccgctcaagaggttagtgatgtcctgctgaatcgttgcaatttcggattgagtgactgcgatgatttgtgtgacttgaacaccgtagtcggtattcagagtcgttagcttattttgttgtaaatagtaggttaaagcatcgacgttacgatagtcgagcgtgatggcgatgcgggtttgtaagattcgctgaaccttaccactgacttcaattgcttgcgcgggggtgccattataagctcggatcagtccaccggcgccaagcttgataccaccaaaataacgggtcacgaccgcaagcacgtcgtgtagctcgttggtcttgagcacttctaagattggtgagcccgcagttccgaccggttcaccgtcatcactcatccgctgaatatgatcatcatcaccaagcatgtaggcgaaacagttgtggttggccttaggattatctgctcgaacagcggcaatcttagcttgagcatccacttcgtcactgatgcggtatagatgagcgatgaagcgagactttttgatggtttgttcaaataccgtgtcttgggtgatggtgtagtagggtttagtcaaattaatcggttcctttcgtgaataaatcgttaaatggcgtacttgataactaaggaggtgcgcacaatggaagcacaagtcttatatggtcgtcagctcgcattatctgcaaatgaggctgccgcagtacctgctggcacgcagatactgccagccatgcaggttgatgaacatcaaattatctgtcagcgttgcggcagtcacttggaccgactgcgagcccaattacccaatcagcaatattactgttatcaatgtttaaatttaggtcgagtgagtacactagttaaactctatcatatgccagaaccgaatgcttttgcaacggtcccggtttgcacgtggcaaggaaccctaacgccccagcaagcggactgcgcgcaatcaatcaaagctaacttcatggcgcataaacggcaattattatgggcggtgacgggagctggaaaaactgaaatgctgtttccaggtattgcgtgggcgttagcgcatcagtggcgggtcgccattgcttcaccacgagtcgatgtttgcttagagttagcaccccggctccaggcggcctttgctgatgttcaaattgctgtgctacatggccgcaatcccgctccctatcagtatacgcagctgacgatttgtacgacgcatcaattgctacgttttcgtcaggcgtttgacgtattgatcattgatgaagttgacgcgtttccgtttgctgccaatccccgtttggcgtttgcagtgaatcaggcagctaaggtggagggggccattctttatttgaccgcgacgcccagccaaagtttgttgtcccaagttcatcgtggtgagcttgcaatcagttatttaccattgcggtttcaccaacatttattaccggcaattaaggttaagctacagccaaattgggctcggctcttgcaacaaggaaaattaccacgagaccttatccggcaactccaacagtatcaacaacagcaccagcgctttttactatttgtcccgcgcatccaacaattagcgccagtgtttgcggtactccagcactattttccccatatgaccggagagacggtgtactcagccgatcctgagcgactgactaaggttcaacaaatgcggaaccagcagtttcaatacttagttacgacgacgatattggaacgaggggtgacgtttccgggaatcgatgtgattgtgcttggtgcggacgacgaagtgttttctacggctgccctcgtccagattgcaggacgggtcggacgcagcagtgagcgtccgactggcctcgtctggtttatttgtcacagtcatagccgcaatatcaaacgcgctcagcgccagattcgggtgatcaatcgaaaggggcgacaattacgtgctagcatgcctactgtgtcacaacattatcacgactaagtttacgttgccctggattcttagctggcagccggttatgcggccggtcgtctgctcggtttgttggcggcaatttgtacgcatcgatcgggcaacggcatgttccaaatgtggacgtgctcaaaagcgaccgcaaccgtgtacagattgtcagtggtggcctgaaatcggtccctttcataacgaggcgttgttcgaatataatgatgcgatgcatgattattttcaacgctataaatttcagggtgattatcaattacgccaagtctttgcgaagatcatgcaacaagcagtggtacaacggtgtgctgagatatgcttagtggtgcctgtcacgcccacaacgttgcaaacacggggctttaatcaagttgccggctggttagccgcacccatcgcgcccgggttaatgacccaggcaacagcgaagtcagtgccacaatctaagaaagaccggcaagcgcggttgagaacaccacaaccattcaagatggctcctaatacgattttggccggccggcgggtattattagtagatgacatctatactaccggccgaacgatgcgccacgcggcaacgctacttttggaaaacggtgccaagagcgtgacggggctaacactagcacgttaatttcgagggaaagtggtatttggattgtttattatagcgctttctattataatgaatttaagcaaagtaattaaagagtggtcctttaattactttgggtacacagcaatgtgtgtgaagggagagaagatctatgctaaattttaatattcgcggtgaaaatatcgaagtgacccaagcaattcgggactacgttcaaaaacgggtgggtaagttacagaagtactttgacaataatgttgactcaattgcccatgtcaacttaaaagttcacccagacaagacggctaaagtcgaagtcaccattccacttccctatttagttctccgggcagaagaaacttctcctgatatgtatgctagtgttgatttggttactgacaagttggaacgccaaatccgcaagtataaaactaaggttaaccgcaaatcccgtgaaaagggttataaagcgattgattttgcagcgactgatgaaacagttgccgctgccgacaatgatcaggacgataagttagacgttgtacgtacgaagcgagtggctttaaagccaatggataatgaagaagcgattctgcaaatggatatgctcggccatgacttctttatctacgaagacgcggaaacggacgcaattaacatcgtctatcggcgtaacgatggtcgttacggtttgattgaaaccgacgacaatcactaattttaaaagcgcaacttatgaggactggtcagttgaccagttctttatttttatcccggaacgcccgtataacatattgtgatcatgagagtgacttagcccgcgttagtaagctgaagttcgactcacggcacgtttttgccagcgactcaagacagttaagcaaatattgatagaattaaagaacacgggtcagtgattgttgggctgtggttaaagactaatatttagttaaggatgtaaataaaacggtcgacggtatcggttacataggggcctgtggttttcattgctagtaaataatggtaaaatgacagatggtattttattttgaaatggacaattgaaattaaaattaagattaattatttggagaggatacgtaaatggccaacattttaaaacgctgggttgaaagcgacaagcggactattcggcgtctggataagattgctaataaagttgaagcttatgccgacgaatacggcaagttaagtgatgctgacttgcaagcgaagaccccagaatttcgtgaacggtacaaggagggcgaatcgctcgacgatttgctgcccgaagcatttgcaacggcgcgtgaaggtgcgaagcgggtacttggtttatacccattccacgttcaaatcctcggtggaatcgttttgcatcaaggtgacattgctgaaatgaagactggtgaagggaagaccttaacggccactatgccagtttatttgaatgccatctctggtaagggtgttcacgttgtaacagttaatgaatacttatcagcgcgtgatgcgactgaaatgggtgaactgtataactggttagggatgagtgtcggaatcaacggggctgaaaagtcgcctgaagaaaaacgtgccgcttataacgccgatattacttattcgacgaacggtgaaattgggttcgattacttacgtgataacatggtggtctaccgtgaagacatggtgcaacgaccacttaattttgccatcattgatgaagttgactcaatcctgattgatgaagcccggacaccgttgatcatttctggtcaatcagaaggtacaacgggaatgtataagcgggctgaccgttttgctaagacgttgacgaaggatgaagattacaaggttgacttggaatctaagacggtcgcattattagacgaagggattcggaaggctgaaaaatactttggcttggaaaacctttacgatactgataatacggcgttgaaccattacttggatgaagctttgcgtgcgaactacatcatgttgaaagataaagactacgtgatttcagacggtcaggcgttgatcgttgattcctttacggggcggatcatggatggtcggcgcttctcagacgggttacaccaagcaattgaagctaaggaacacgttgagattcaagaagaaaccaagacgatggcgaatatcacgtaccaaaacttattccggatgtacaaaaagttatctgggatgactgggacggccaagacggaacaagaagaattccgcgaaatctataacatggaagttattacgattccaacaaaccgcccgatgattcgtgatgaccgttcagatttgctttacccaacgttacaaagcaaattcaacgcggtcgttaaagaaatcaaacaactccatgaaaagggccaaccaatgttaattgggaccgttgccgtggaaacgtcagaatacttgtcgcatcgtttggatgaggaaaacattccgcacgtggtcttgaacgccaagaaccatgcgaaggaagctgacattgttgcaaacgccggtcaacgtggtgcggttaccattgccaccaacatggctggtcgggggaccgatatcaagttgggacctggtgtcaaagaagtcggggggctcgccgttattgggactgaacgtcatgagtcccgccggatcgataaccaattgcggggccgtgctggtcgtcaaggtgatcctggtatgtcacaattctacctctcacttgaagacgatttgatgctacggttcggttcagaacgaatcaagaacttcctgcaacggatgaatgttgaagatgatgatgcggttattcaatcacggatgattactcgacaggttgagtccgctcaaaaacgggttgaagggaacaactatgactcccggaagaacgttctacaatatgatgatgttatgcgggctcaacgtgaagtgatttacggcgagcggcaacaagtcattatggaagaaaaatctttaaagcccgttatcatgccaatgatcaagcggaccgttgaacggaccgttcagttacacatgcaaggcgatgccaaggactgggatttagatgcagttgttgactttgcccaagctgctatggtgaaggaagattcaattagtgtggctgacttgaaaggtaagtcgccagcagaggttgaagcttacttgatggaccgggtcgataagatttatgcggacaaggctaaacagctttacgatgcgggtcagatgctagaatttgaaaaagtcgttattctgcgagtggtcgattctcattggacggatcacattgatgcgatggatcaattacggcaatcgatcggtttacggggctatggtcaattgaatccgttagttgaatatcaacgagacggttaccagatgtttgaagaaatggttgcggatattgattatgatacgacgcgactcttcatgaagtctgaaattcgccaaaatattcagcgttaaaatttaacgttagtgctagcgagtctaagactaaggtcttaggctcgttttacagttaaaccagatattaaataattaataaataagttgaaagaagggtcctttgtggaattaagtgaatataaacacctgattgaagaaatgcaaagtgctgtcgacgactttagggggtcgctttgacttagatgctttgaacgaaagcattcaagaaaatgaagctcgaatggccgaacccggtttttgggacgaccaggctgccgcccagaaagtcatcgatgagaataacgtgttgaaaggaaagtatgatacgtttaagcaattagctgatgaagtcggtgacttggcagtcgcttatgagttactgagtgaggaacccgatgctgagatgcaggctgagtttgaaacggactttcagcacgctgaacatgatttacaacagtaccggctcaacttacttttggacggtccgtacgaccgcaataatgctattttagaaatccatcccggagctggtgggaccgaatcccaagattggggtgcgatgctactaagaatgtacacgcgctgggctgcgagtcacaatttcaaagtcgagactgttgactaccaagctggtgatgaggcaggcattaagagtgtgactttattaattagcgggcacaatgcttatggttatttgcggtcagaaaaaggggttcatcgtcttgttcggatttcgccgttcgatgcggctggtcggcgccacacatcttttgcgagtgttgatgtgatgcctgagttagatgataccgtggatgttgatattcgacctgaagatttgaagattgacgtttatcgagccagtggggccggtggacaacatgtcaacaagacttcttcagcggttcggattacccacgtgccaacgggaatcgtcgttgccagtcaagcacaacgttcacaattacagaaccgacaaacagcattgaacatgttgcgagcgaagttgtacgaacgtgaagaagagaagaaggctaaggaacgggcggccatccaaggtgagcaaatggacattgggtggggctcacaaattcgctcctacgtttttcatccgtatacgatggtcaaggatcaccggactaattatgaatcacatgatggtcaggctgtcatggatggtgatcttgatccgtttatggatgcttacttacaatggaaattagcccaacgtaatccgcaatagattgcacaaatactaaggtgacctatcattgcgcaggtcgtcttagtatttttttggctactagtcttataatatagagatattaaagcggtaatagcaggactgacggaattgaaacggcgttggtctccttgggcaaaaatgctatactaacttcagagtttaacgttaggggtcacgcacatgcaggtattaaagatttttgaattgtttcttttacaaccgctagtttggttaggattgctgcgtagttatttaaccgctaaacggcgggtgaagagtgaacggcagcattttcagagtgctatcaacccacaattagttgaagtccaccactttttagtggatggctgtttactaggagttctaatgacaattattagcttggcattgggattagtggtggcccccatctgggtggttatatacgaagtagtggcggccattagcttgatcattattcctggtgcactggtaccagtgaccgcttttggcctcagctggttagtttattggattatgagcccggaattaacgacggtggggggcgctttacaacggcacggtgttgccatgaccagtatgagtggcaatttggtggtgaacggactattgttattagccatcgtgctggcggctacggcggtcttgttacgacactatgattatgagggccgttcaccgcaactacagcccgaccaacgtggaaagcgacttgttcgttaccagtggcaacaattgttggtcttaccagttggggtactggtccccggtgattggttacacgcaactatcagttggtggcctgtgtttatggttggcgagcgctccttcagcattttattgttgcctttattagttgggacgagtgttcgcgtttataagcagctgccacaaattgcatggcggcagttagcggcccgctatggttgggtaacactcgcgagtgttttggttgcaatcattgcccgttttgcagtgctcagcccgcagtggttgctagcattgatgggattaatcgttgtgctaacttggggaatcttagcacagcaccgttattatgatcgacaccaacagtttcgatattctgatactgaacaaggtgtgcgggtgattgggttacgcccccacacgcccgcggataaattaaatctcgatttaggagatattatcttggaatgtaaccggcaaccagttaatacggaagctgaattttacgcggccctactgaaaagtccgacgtatgttcacctcaaagtgcgcaatcggcaacaggaattaattattaccgaaacggcgatctataatggcgccccacacgagttaggaattgtgttattcactgatcaggaggattaatgaccatggataagattttagtggtagacgacgaaccagctatcgtcacgttattatcatataacttgaagcaggcggggtacgaagttgtgacggcgacggatggtgcggacgcgttgtcattaggcctggcccaatcatttacatgtattttgttagatttgatgttgccgaaactcgatggaatggaagtaacaaaaaagttacgacaagaaaaggttcagacgcctattattattgtgacggctaaaaatgatgagtttgataaagtgttcggcttggaattaggtgcggacgattatataaccaagccgttttcaccccgcgaagtgctcgctcggatcaaagcagttattcggcggacaacgccggacgagcccgtgacaccaccggcacccatgccgcctgctaatcgtgcggtaatgcttgttggtgatttacagattgatcaaaacaaataccgagtcgcgcgcaacgggaaaaatatcagcttgacaccaaaggaatttgaattacttgtgtattttgttgaacgagaaggtcgggttctcagtcgtgatgcgattttaaatcacgtctggggctacgactatgctagtgagacgcggatcgttgatattcacatctcacatttacgtgaaaagattgaagcagattccaagcagccacggttgatcaggacggtccggggttttggctacgaatttgtgggtgacggccatgcataatcgctggcaacagacgacacggttattgctcatggaaaatgtgttactggttttgatcgtgttggtcgtgttgcagcacttttcgccaattaagtggtcctggcgcctagtcggttgtttagttggtgcttggctggttttggcagtaatcgagggcttgatcgcttggcggcaacaaagtgaacggcagcgcacgatcgaccgtatggaagctaagcttcgtcagatgagtagccagcaatttccaccacatatcttattgccacaatcggaccccttatacagcctagcacaagcggtcaaccagttagagagttatcaaaaaagtcagacgcgccgtgcggaactgcaagaaaaagagttaatgatgattatgcggtacttgcctgtgggagtgatggtcattgaccaccggcgacaggttcaactgtctaatccggcgatgagtgaactattgcaagtctcggttaatacggtggcccacatttataccaaggatattcagctgtacgcgttgactaaattgattgaagatacgattactagtggcaaaaatcaacgggcaacgattacgttgactccagcgcctaacacgcaggttgtcgaggcttcaaccgtttatatccaaggcaatcgttcacaatttcaaattgtcctgatgttgtatgatatcactgaagtctatatgattgaacaaatgcaggatgattttgtcagcaacgctagccacgagttgaagacgccgattacagccatttccggtttcactgaaacgttgttaagtggtgccaaggatgatccggacacgcttgaccaattcttgcatattattgcggatgaaagtcaacggttgattgatctcattcaggatgttctgtcgctatcgcgaattcgtgctcagaatacgacgatgttaaccttagttccgcttgctgttcgaccattgatcgaacaggaactggctgtagttcagcaggcaatcgaacgtcagcacttaacgatcaataaccaagtcgatgctgatctaatgataacgagcgattcacagaagttgagtcagataatcaaaaatctgttaacgaatgcaatcaagtataatcgacctcatggtagcgtgacgattgccaccatggtcagtcatcaaacgtggtcgctgatagttaaagatacgggcattggtatcagtgccgatgatcaacagcgtatttttgaacgcttctatcgggcgagtccgtcacgttcacagcaacttgtgagtgggactggactcggattagcgattgttcaagaattggtcaacacaatgcacggaacaattgacgttgtcagtcaacggggcgttgggacaactatgacagttacattgccactagctgcgagtgcttccgagcagtagtaaggcgttaagcatacggacagttctgattgtaactggtggtctatcaaatgatgacgtggtgacggtatgagttgcattgctgagtcaaaagatgtcattagttgagcattgaatgtgtcgtaattaagccagacgaattgataacgatttttaaggtaaatgtaaaccttgaaaatcgttttttttgtgcacttttttaattttcctttcatattgggggctaaaagccggtaataattaaaaatatatcgacgtttacacaatctttacaaaactcatataaagcatttacacaaactttgtattattgaatatgagcaatgggtaggaggtatatagttatgagaaaaagtcgggtcatccaattaatcgtgttaatcgcgatcattggactagttggattagggtacacacatcgcgatcaaactagtgccagtgaatcaattaccgcggttggatcaacggccttacagccactggttgaagcagccggtgaacaatacagcagcaaccataccggtgtgtttatcaatgtgcagggtggtggctctggaacgggactcagtcaaattcaggcgggggccgtggcaatcggtaattctgatatttttgccgaagaacagtctggcattacagcgagcaagttaattgatcaccgggtagccgtcgtcggtattgcccccatcgttaataaaaaggcgggcattaccaatttgacgcagcagcaactcattcagatttttactggcaaggtcacgaattggcgtgaagttggtggacgtaatttaccgattacgttaattaaccgtgctcaaggctccggaacccggaagacatttgagcgatacgccttaaagggtaatcagagtgttgattcccaagaacaagattcgtcaggattagctcggtcaattgttgctagtacacctggcgcaattagttatgtggctttttcttacttagacaactcagtccagaccgtcaatgttgatggtattcggccaaccgaaaaaaatgtgcggaataatcgctggtacatctggtcctacgaacatttatatacggggaagcaccccaatcagttaaccaaaaaatttattgattacattttatcaaccgctgttcagcagaagttagtcaagcagttaggttatatttcggtccatgacatgcaagtacagcggaatgcggccggtaaagtttcagttatgaaatgagggagagcgcatggataaaattcgagaaagcttattaaaaaaatcagttgctagtaaaattgaacggcgtggtaaggccattagtctagtttgtctagcgctaattgtcgggattgtctttttgattttctactttgttgcatcacgggggttagcaaccttttttcaaaatcacattaatctatggcaatttctgagtgggacgcagtggaaccccggaacagtcggaacgaatggacaaccagctgtgggggcactaccgatgattgttggatcgtttttgattacgattctttcggccttcattgccacaccgtttgctatcgggacggcggtctttatgaccgaaatttcaccacggcggggggcgaagattctccggccagttacggaactattagttggtattccatccgtagtgtatggatttatcgggctacaagttgtcgtaccgtttgttcgtaatacgtttgggggtagtggctacgggattctttctgggacctttgtgctatttgtcatgatcttaccgaccgtgacgtcaatgacggcggatgcgctgaattcggtaccccgttattaccgagaagcctcgctagctctaggggcgacgcgctggcaaacaatttataaagtcgtcctgcgggcagccattcctggcatgctgactgccgtcgtatttgggatggcccgcgcctttggggaagctctggcggtccaaatggtgattgggaacgcgacgttgttgccgcataacctagtttcaccagccgcaactttgacaagtatcttgacgatgggaatcgggaacactgtcatgggttcattacaaaataatgcattgtggtcattagccatgatcctgttattgatgtccttagtctttaacttagtcattcgctacattggtcgaaaggggaaattaaaccatgaacgctaaacgcatcgataaaattgccactggcgtgctatacggcgtcgcagcctttgtggtcatcatcttagttgccctattgggatacattctgatccaaggggtgcccaaaatttcgtggcattttttaacgtcgccggccctggcttttgaagcgggtggtgggattggcattcagttgtttaactccttctacttactatttttagcgttattgatttcattaccgatttcactgggtgcggggatctatctaaatgaatatgcgccgcaaaatacggtgactggcctgattcggacgaccattgaaattctgagttcattgccatccgtagtcgtggggctgttcggatacttgttctttgtagtgcagttcaagttaggcttctcgattctttccggggcgtttgcgctgaccgtgtttaacttaccgattttaacccggagtattgaggaagcactcgccaatatctcagataatcaacgggaggccggctacgcgttagggctatcacgttgggagacggtgacgaagatcgtggttcccgctgccttaccaagcattttaacgggggtcgtcttgagtgccgggcggatctttggtgaagccgcagctttaatctacactgcgggtcaaagtgcaccagccttggactttggtaactggaatccatttgatatcagtagtccactcagtccactacgtccagccgaaacgttggccgttcatatttggaagatcaactcagaaggaattatgccggacgcgaaagccgtttcggcgggggcttcagccgtattaattattgcggtattgctctttaacttcttagctcgttggcttggcaaacgcttgtacaaacacttaaccgctgaataaaggaggccgttttgatggcagataacacaatgacgacgacacaacgtaacatcatggcgtttgatcctaaagatcatgaaatcgcgctttcaactgaggatttacacgtcttttatggtaaatccgaggctatttcagagggcgatttacagtttgaacgttataagattagtgcgttgattggcccatccggttccggaaagtcaacctacttgcgttcgctaaaccgaatgaatgaccgtattgcaacggttaagggcaaaattatgtatcgcggcttagatattaacagtaatgatattgatgtctatgagatgcgccggcacattggcatggtgtttcaacggcctaatccgtttgccaaatcaatctatgagaatattgcttttgcactccgccagcgcggaatgaacaagaaacaagacttggatgaaattgttgaacggtctttacggcaagcggcgatgtgggaccaagttaaagatgacttaaataaaagtgcgttagctctgtctggcgggcagcaacaacgactctgtattgctcgggcaattgcaatcaagccagacattttactgctcgatgaaccagcgagtgctttggatccagtatcgacaagtcaaattgaagatactttgttagaactaaagcagaattataccattattattgtgacgcataatatgcaacaagcatcgcgaattagcgactataccgcgttctttaacctcggcaaagtcctagaatactcagagaccggtgagatttttaccaatcctcaggttgatctgacgaatgactatatttccggaaactttggataggaggaccgttcatgagtacaattttaacgaccgagaacttatcattattttatggtaaaaaagaggccctcaaaggaattaacattgattttgatgataaaggaatcacggctttgattgggccctctggctgtggtaaatccacctttttacgttgcttgaaccggatgaacgatctgattcctaatgtaacgatcacgggtgaggtgaacttcaatggtcacaatatttatgcgcccacgaccgatacggttcaattgcgtaaagagatcggcatggtgtttcaacagccgaatccctttccattctcaatttatgagaatgtcatttacgggttacggttgacaggagtccatgataaagaacgcttagacgcggcggtagaaaaaagtctgaagcaggctgcaatttgggatgaagttaaggaccggttgcatgccaatgcgctatcattgtctggtgggcaacaacaacgggtttgtatcgcacgcgtcctagccgtcgaacctgatattatccttttagacgaggccactagtgcacttgatccgatatcgagtcggatgattgaagaaaccctattgaatttgcgccaggattacactatcataactgttacgcataacatgcaacaggcgtcacgaatttctgaccgaacggcgtttttcctgaatggtgaattaattgaggtcaacgacacgaaacagattttcatgaatccagttaaacaggaaaccaatgactatatttcaggacgatttggttaggaggaaaaaaacatgcgacgactttttgatgatgaactaaacgatattgatgcaaacttcactgaaatgggaatgatggttagcgagacgattgaaaaggcagtcaaggcgtttatcgaccatgaccgcgacctcgcacaagaaatcattgataatgatgctaaaatcaaccaacgggaagttgaactagaacagaaatcatttgagatgattgcgttataccaacccgtcacttctgatttgcgagaaattgtcaccattttgaaagccgtctctgaattggaacggatggccgattatgcacgtaatattgctcacgctacgattcgggtcaaaggaaatgtgcgcgtccctgaaattgaggcagcgttatcagaaatggggaatcgcgtgcgaaagatggtcgaagagatgttggcagcttacgtcaaaagtgatgatcaggaagcacgccgggtcgcagctaaagacgcaaaagtcggggagatgtatgatcgtattaatgagaaggggatctccaagatggagcgccatcctgagacggtcatcggttccacggattacctgaatgttgcaacttacctaatgcgcatcggggcgttagtaactaatattggtgagtggatcgtgtatttgaatactggtgagattatcgaattgaatccagaaagttctaatttagtgtaactaatcataaataattgcttaaagccggtcgtctagtttgcaaccggcttttacaattagtaagatatggttagataaactgataaggagcgtctaacgatgaaatcaaatacaaaacaaaagttaactaaatctaataatcgcgttttcgccggcgtcctcgggggcattgctgaatatttgaactggaatgcaacgattctacgagtactctacgttattttaactttggttacccatggctttggtgttttggtatacttagtattaatgacaattatcccaagtaaaccagacaatacgggtttcttcgaacagatgcggcaaagtaccggtactcaagctaaaccgcaagcgcatgggcgcaaagagattcataacgttcatgaagaggatgatccgcgtcactaagattaatggagtgattatacagtgggcttttggaaacgaattttaatcaatacaatcttatttattgcgattgctggcttttttcagagcagttttcacgttgcaagtgtgtggatggctttaattgccagttttgtgcttgcaattttaaacgccgctattaagccgtttttgctgttattatcgttaccgattacgttattgacactcgggctattcagtattgtcatcaatggttttatgcttcagatgacatcctacgttgtgggtaaggccaatttcggcttttcgagttttggcatggcgatggttgtttcgattctcatgtcaattgctaacgtgattgtttccaactttttcgcgaaagacggcgttgatggtgaataaagcgctttaaagtgctaagattagaagatagaaataatccgttttcagtcataaaagtgtggccgcttgaaagggtagcgtaatggcgcgactggacaacgcgggccacacttttttattagtggaacaattaggagggattcttttggcaggaagtgtaaccgttgccgatttggtgaaaaatacgcgcctggatgtgtatcatggcgctgacttattagaaaagaaagatattacaacgagcgacatttcacgtccggggctggcgttgaccggttacttcaactactatcctcgtgaacgagtgcaattgctaggtaaaactgaaaccgcttattcgaaaaatatgagtcatgatgaacgactgatgatttttcgtaagatgtgtcagttaaccacacccgcgttcgtcatttcaacggggttacccgttccagaagaactcgtgcaagccggtgaggaaaatggcgtgccgattttaggaacgaaaatgacatcatcacggattctaagtaatatgacgaattacttggaaggtaaattagctgaacgacaatctgtccacggggtattagttgacatctatggattaggtgtgctgattactggtgattccggtgttgggaagagtgaaacggccctggaattagtcaaacgggggcatcgtttgattgctgatgaccgggtcgatgtctatcaacaggatgaacaaacgcttgtcggtgaagcacccgcaatcttgaatcacttattggagattcgaggtatcggaattattgatgttatgaatctttttggcgctggggctgttcgtcaagataccgacattgaccttatcgtgcaccttgagaattggacgcctgataagcaatttgatagactaggaaatggagaacagaaccggaaattctttgatgttgaagttcctgaaatctcgattccagttaagactggacgtaacctagcaatcattatcgaagcagcggccatgaactttcgggccgagagcatgggctacgatgcgaccaaggtctttgacgataacttgaacaagttgatcaaaacgaattccgtgcatgattctcacaagtaataaggagatggcagtagcgtgaataccgttttaggggcacttaacccaattgcactgcggttaggaccaattcaggtccattggtacggcgtcattattgctagtgccgtcgtcattgcggttgcactagcagtacgtgaaggtcagcgacggggtgttcggcccgatgacatttacgatatgattttatgggcacttccgtttactttaattgcggcgcggacttactatgtgattttccagtggtcatattatcgtcagaatcccggtgaaatcatccgtatctgggatggtggaattgccatctatggtggcttgattggcgccggaattgtggtcattttattctgtcggtcacgctttatcccaacttggctaatgcttgatattgccgcaccaacggtgattatgggccaaggtattggtcgctggggtaactttatgaaccaggaggcttttggtcgagtgactagtctgagtttcttacaaggcttgcacttacctgattggctgattaaccagatgtatatccgtggcgcgtatcggcaaccaacattcttgtatgagtcggtatgggatctattaggatttgccttactgatgctcacgcgtcatcgcacacattggtataagcagggtgatgtcttcttgacttatgttgcttggtacgcctttggccgcttcttcacagaagggatgcggactgactcgctcatgctatttaacgttattcgggtctcacaagcgttgtcagtggtactgttctttggtagcattggcttaatgatctggcgccggcatcacaatccgaataatcgttggtatttagcgggttctggtcaaaaggttgtcgcagaaaataagtagattagagggttatttgaatgataaaaaaaattgccgttttaggtgctggctcatggggtagcattttggcaaatctgttggatgaaaatggccactcagtgcggctctggtcgtactcaccggcccaagtcacagaattaaatgagaaacacacgaatgagcgatacgttcctgattttaaatattcagaaacgttgactgcttattctaatctaacacaggcgattgatggtgcggatgtaatcttgtttgtcgtaccaaccaaagcgattcgcgaagtggcccaacaagtgactgccgtgcttgccaagacccatcagcggccgattattgtgcatgctagcaagggactcgaacaagagacacacaagcggctgtcgcaagttttggcagaagaaattcccaccgaattacgacaagcgatcgttgtcttatcgggccctagtcatgctgaagaagtggcccgccacgatattacgttgattacggcggctagcgccgatgaatctgcagccgaattagtacagcaactcttcatgaatgactatttccgcatttacacgaataccgacgtggttggtgttgaactaggtgcggcgctcaaaaatatcattgccctgggtgctggtgcgctacacggcctgggctatggtgatgacgccaaggcagccttaatgactcgtggtttagctgaaatcagtcggctcggagtggcgttgggcgcagagccgttgacatttatcggtttatccggtgttggcgatttaattgttacggcaactagtgtccattcgcgtaactggcgcgctggtaatgagttaggtgctggtcaggacctcaagacggtgattgataccatgggcatggttattgaaggtatcccgtcaactaaagccgcttacgagcttgcacagcaacaaaatatcgaaatgcccatcactgaagcgatttatgatgtattatataagagtgccgacattaaggaagtcattccacaattgatgcggcgcgaggggaaacctgagattcagtaggaatttccaaactaatttcactatttttaggaggatttatcacatgtcaaaagttagaaaagccgttatcccagcggccggattaggaacacggtttttgcctgctactaaggcgatgcctaaagaaatgttaccaatcgttgataaaccaacgattcagttcattgttgacgaagctcgtaaatcggggatcgaagacattgttatcgtcacgggtaagagcaagcgtagtattgaagattactatgattctaacccagaattagaggataacttacgggctaagcacaaggaagaaatgctcaagctggttcaagaaaccacagacattaacttgtactttatccggcaatcacacccacgtggtttgggcgatgccgttttaacggctaaagctttcgttggtgacgaacctttcgtcgtcatgcttggtgatgatttaatggaagacaaagtaccgttaaccaaacagttaatgaatagctatgacaagacacatgcgtcaacgttagctgttatgaaggttcctcatgaggaagtttctaagtatggggttatcaatcctgaaagtgaaaaggaaccgggcctatacaacgttaataactttgttgaaaagccatcacctgaagatgcgcctagtgatcttgctatcattggtcgttacttattaacaccagaaatttttgatgttcttgaaaaccaaaaacctggtaagggtgacgaaattcaattgacggatgccattgatacgttgaacaagactcagcgggtctttgcccatgaatttaaggggactcggcacgatgttggctacaagtttggctacttgaagacgacgatcgaatacgggttaactcatccggatgttaaggctgacttgcggacttacatcaaggatcttggtgctaagttatctaaagaagatagcgccgctcctaaaacaacgaagaaaccaactaaataatacttgattaattaaaacaaccgtgaaatctattaagatttcacggttgtttttagttaactgctgaataattgcgattcactaattaagctggcacctagtggtcggcttttaatttgaataaatggggcttgccataataataaccttggcgtagtgaaatatttaagtcattcgccatttgatcttcggcatcgttttcaacaccctctagaattaaccggatatcatgttgtaccgcaatgtcgcgccagaattttaattgaatgggaatctcgttttcacgatcttcggcccgaaagttttgcatggcgaatttgatttcttcggccgattcgagtagcggtttaatgtggtcgtaaacgttgattcccgtgccaacgtcatcaatgctaaattgtaggccgttagccttgtacttatcaatttgttgttgcatcgccgccagtgtaaacgtatcttcaccgggttcttctgtgacttcgacgataacatgaaccgggaataactttttctgagcatcaatgactgcggcagcaatatcatcatttagaaattgcttgcgattaaagttaattgatactgacccgatttttaatgcaagctcactagccgtagcctttagtaagctgacttgtacatcgatcggaatattatcgaagctttctggtaaggtccaccggtcctgatcagtctcacgatagcgaatcagcatctcgtagccaatcagtgaattattaaatttatctaactggggctgaataaaatagcggtacataagggaactccttagacttgaattaacacgatttgatgcttcctaatacatactataccaaaaaatgaataagtgaaactgtttgacaccatctttttttgcatggtatcgattatcaattgggctaatgatgattgtgctaaactgcttggtgaacaaggtaattttctgaaaatgagtaaaaagtcaattagtggttgcctggcaaagctggtatggacgatattgtgagaataactgcttgccagcgtatcgctgattggtttttaaaagtagttacgtttcatcataacctgtatttatattgactagagttatgtatttgcgcagtaaagcggttataatatacctatggttaaataaataaaattataattgggagcaaaatgaaatgaagattgtaattgttggatgtacgcatgcggggaccgctgcggctgcacaaattctgaaggatcatccggaggctacggtcacgatttatgagcgtgatgacaatatttcattcttatcatgtgggatctacctttatctcgggggaaaggtcaatcacttggaggatatgttctattcgtcaccagaaacgttagccaagttgggggcaatggtcagaaccaaacataacgtgttaaaaattgacgcccagtcgaggaccttacaagtggttgacatgactactggaaaagtgtttggcgatacttatgataaattgattatgacgactggttcaaatgttgcggtcccgccgatttttggaatcgatgagtctaaggtcctattatgcaagacctacagccaagcacaggaaatttaccaaacagcccaagacaatcagcggatcgcaatcattggggcgggttatattggaaccgaattatctgaaagttatgcaaatacacatcatgaagtaacgttattccaatcgcatgatcaaattttgaataattacattagtaaagaaatttcagaccaagcagttcagctattaaaagatcatggcgtgaacgtgctattgaatcaccaagtaactgcctttactggtaatgatgatggtgaacttgtcattgaaaccaatcaaggcgattttaatgctgatctagcaattgtcggaactgggtttgttcccaatacagaactgttacgcggtcaagttgagatggataagcacggtgccattatcatcaatgattacgttcagacctctgacccagatatttacgctgctggtgattcttgtgtcgttaacttcaacccaactgggcgttcggcttatacgccattagcaaccaatgcggttcggcagggtgcgttagcgggggccaatgtttttggtaaccagcaacgatatatggggactcaagcgacatcggccatgcaactcttcgatcacacgctggcaaccacggggttaacactggcaatggcgaaattgaatcatattccagctgaacgggtgacttatgagggcaactggcgaccagcttacatgccaagtacggcgaaactgacgattgaattaatttataatccggaaaatcgtaaaattctcggtgctcagttcttaagtgcgcatgaagtggcacagtctgctaatgcgttatcaatcgcgattcaaaatggaaacaccatcgatgatctagcatttgtggatatgttattctcacctaattttgatgaaccattcaattatctgaacctcgtcgcccaacaagcgattgaacaagaacgccaggcaggccgcaatcacccacgaattacggcctatggcgattgggccaagcaaaatgacaaggatttacaataagaagtaagtcttaccatgggttgaattcaagtgaactggcataattttatttatttaaatctcggtttttagtcaatatatggttaaaagctataattgacttcagttgtgtacaaacaagatagtcgacaaatgtaaattttgggggtatattaagcgtcataggaatttaagtggaaggggtctttagaaatggcaaagagttacgacgtgattattattggtgcggggcctgccggcatgacagccgccctctatgcttcacgagccaatctatcagtgctactattagatcgcggaatctatggtgggcaaatgaataataccgccgcaattgaaaattatccgggcttcaaatctgttttggggccggatttggctaaagacatgtatgaatcagcgacccagtttggtgctgaatacgcgtatggtagcgtcgaatccgttgaagatcgcggcgatgttaaaatcgtgacgacggatagcgatacgtttgagactaaggcccttgtcattgggactggttctgaatatcgtaagctgggtgttactggcgaggatacgtatggtggccgcggtgtctcatactgcgcagtttgtgatggagcgtttttccgtaacaagcatgtagttgtcgttggtggcggtgactcagcgattgaggaaggcacttacctgacacagcttgctgataaggtgacggttattcatcgtcgtgaccaattgcgggcacaacaaatcttacaagatcgggcttttgctaatccaaagatggaatttgtttggaatagcaacgtgacggaaatcatcggtgatgataagaaggtcacgggagttaaggttaataataataagactggtgaagacagtgagattgcggtcgatggtgtctttatctatgttggtattaacccaattacgaagccattcagtaatcttgggattactgacgaaaacggctggatcgaaactaatgaccacatggaaaccaaggtccctggtatttttgcagtcggtgatgttcgtaagaaagatttacgccaagttgcgacggcggttggtgaaggcggaactgccggtcaaggcgtttacacttatatcactgctttaggcgacaaagttaacaattaaataaaattaaaaaatgcgtagctgatttaattgagatcagccacgcattttttattggtaaatatagcgttagtcattgtttgacgatgaccaaaggttcgcgaattagtgttgatagggaaatagaagcaattgcttgttagtatacgttgccaggtaaatatcactgacagtatagtgctgggcctgcaattgggtcagtaaccaggcttcatcatgattactagtttcaagcgcatcgaggttgacctgaccatcgacgattattggatacttgacggcgtcgtcgcccacttgggtaatcgtcagttggccgttttgttcaagtacggcccgtttgacgtagcgaatatccgtgataccttccgtacgcaagcgaaacatcagatcgttagcactcatcccatttttgagggccgtgctgacgagtaattgcccatttttaatcaatagctgtggctgtccatcaatcaaacgtttcacgtagcgattgtgatgtgttaggaatcgcaggaccagcactagcagtgtccagatgagaagcactaaaatgtattgtaaaacagtaacgctggtactataaatcatgcccccaacgattgcaccgagaacgtagttttgaacttggtcgagggcgctgattggcgcaaggttacttttaccagatagattgatttgtagaatgatggtcaatagcccgagggccagtttgatcgtcacatcccagtatgaaaacatatattgcccctccttaacataattgattgttgattgaatcggtgtggctttagtcagggtataactgtttccatccgtattgatcgtcacgttatagatatggtcatggactttaatgagcatcccactgctgacagaacttgtattagaccagaccgcggttttacgaacccctttttctttggcgacacgctgcataatttgtgtcacttgtgatttttggttgaaactatttttgattgtctgccattcattaaattgaatgccgacgagcagcaataataataaaaccatgataatgaataagtcgcggtattttaggtctgttttatggcggtaccataaccagctgagtatggcgattattaatataatgatgccgatggctgcgagttggacaagagtatgattgttattttgatggactaagtagttgtatgaataaaaagtcatgatggcctccttataagatttattatagcaagttttgatagtgactgaactaactagcacttcagaatttatgggtattcgcactgatgcgggcccactacgcatttaaaatgcattaattaatggattttcttagtaaattttactttgtaaagtgtgtcaatgttgtatactatttttgtaagcactaacaaatatcggaattggagatggtttttgtgagttggcaggatacttataatacctggaaaaaccaagcgacacttgaaactagtttaaaacaagaattgacgggcatggctggcgatgacgccgccttagaagacgccttttatgaaccaatggaattcggaaccgcggggatgcggggggtacttggacctggtatcaaccggatgaatatttatacggttcgtcaagcaacggaagggttagcacgcttcatggataccttgcctgctgaggttaaggaacgcggggtagcaatcagttttgattcccgccatcattcagaagattttgcgcatgaatctgcgcgagtattgggccaacatggtatcaagtcatacgtttttgaaagcttgcggccaaccccagaactttcatttaccgttcggcatctgcatacttacgcagggatcatgattacggcgagccataatccgaagcaatataatggctacaagatttatggcgaagatggtggtcaaatgccacctaaggaatctgatcttatcacatcatatattcgtaaagttgacgatgtctttgcgattgccgttgctgatgaacaacaattattagctgataagacggaaaccattattgaggatgatgtcgatcaggactacttagctaaggtcaaagaagtgacgatcaatcaaaaactagtggatgaagtcggtaaggacatgaagttagtcttcacaccattacatgggactggccggatgcttggcgaaaaggctttgaagaatgccgggtttaaaaacttcagtgttgttaaggaacaagctgtggctgaccctgaattctcgacggttaaattccctaatcctgaatttcctgaagcctttaagatggccattgatttgggtaaaaaagaaggtgcggatgtcttgattgcggttgatcctgatgctgaccggttagggacagctgttcgtcaacctaatggtgagtatgttctgttgacgggtaatcaaattgccgctgtcttgttacactacatcttgcaagcaaacaaggatgccgggacgttaccgaccaatgcggccgcagttaagtcaattgtttcaagtgaatttgctactaaagtagcggcttcatatggtgtcacgatgatcaatgtcttgaccggtttcaagtatattgctgaacaaatcgaacattttgaagccactggcgaacatacctatatgtttggttttgaagaaagttacggttacttaatcaaaccatttgttcatgacaaggatgcgattcaaaccacagtgcttttagccgaagtagcggcttattataagcaacaaggtaagaacctttatgatggattacaagacttgtttaaggaatacggttacttccgcgaacaaaccacgtccgaagaatttgatggcgttggcggcagcgataagattgcggctctgatgactaaattccgaagcgaagcaccaactgcctttgccggctacgatgtcactgggactgaagacttccagagtcaaacggaaagctttgctgatggccacacggcaccaattgctttgccaaaggcgaatgtcttgaagtatcatttaaatgatggcacttggatcgccattcggccatctggtacggaaccaaagatcaagttctacattggaacgctaggtagtacgttagaagaagctaatgataagttagcgaaatttgaagatgccattcaagcgtttattaaagaataaattggttatttagtcagaagttgtacggcccagctgactagccatgctaagtgataaataacgccttacgaaatttcaagttaatttcgtaaggcgttatttagttgttgttcatattagaaattaattcattgtcggatattcaaagttgacggggtcaccgggtaggcgtaataattgcggtttgccatagtaataaccttgtcgaagattaatatcgaagtgactactcaagcgatcatcttcggcgtcttcaatcccctctaagattaaacgcaatccgtattcactactgatggcccgccaaaaatggagcttttgctgaatcttaggatctttgatatcactgcggaagttttgcaacgcaaattttaattcagaagctaatggcaaaatttcttggatactcttgaaatcgttaattccggtaccaacatcatcaagtgaaatttgcataccatgttcgatgaacccccgtaagtgtgggattaacatggtatctggataatccttaggactacgttcctcagttagctcaacgactaatttagcaggatagagctgaacctgactttgaataatggccttcgcaaccgttgtatccatcaattgttcgcgactgatattgactgcacaataacgaacttttagtccaagaattttagtcgttgcaatgagcagatcagaggtaacttgtgaactaattgcggtaaaggattcaggcagacgccagccgtctggggttagttgtttgattagtagttcgtatccgtaaactgtattgttgagtaagttaagttgaggttgtacaaaatagcggtaaattggttccataagtaccatcgccttttataataagtttaaaatcattgaatcgttttaatatcaaccgaatcgctgtatactctaagtatacgtcaacttaaataaatgtttaacttaatccaagttaaattttaacttttaatgaaagctgtggtcgaaacaatgaaagttgccattattggctgtacacatgcggggattgccgccatgaaacaaatcttgaaatattatccgggcactgaaattaccgtctatgaacggcacgcggatatttcatatatgtcttgtgggacttatctacacttagggggtaccatccataatttggatcaagcgttgtacgctaatcctagtgaatttagtgaacaaggtgtgcagatgcggatgcagtatgatgtgatcaatgtgaatgctgataagcatacaattttggctcaaaatttacagacaaaagaattacaaacggatcactatgataagttagtcatggcgacgggttcaatcactgcaatcccggctattccgggcgtagagaatcctaaggtcatgctttgcaaaacatgcgaacaggcccagcaactctacgaagcagctaaacatgcacaccatattgcaatcgttggtggtggctattcgggggtggaacttgctgaggggtacgtgaagtccggacacactgtgacgttgtttcaacggggcccccacttaattaatgagtatcttgatccacaaatttctgagaagatcgaagacttgttaacgacgaaaggcatccaagttagaaccaatgcacaagtgacggcttttagtgatacggctgataatcgactacgagttgcaaccgctgatagtgaagaaatatttgatatggctgttatttgtccgggtgtgattccacaatcagagttattggcgggacaggtcaaccgaactaagcagggggccattgtaacggaccgttatatgggaacctccaacccggatatatttgcggctggcgatgtgacggaaattagctttaatcctacgaaggaacacgcctatatgccattagtctcacatgcaattcggcaaggtgcactggcaggaattaatatctttgataaacgcttaggtgcaattggtacgcaagcgacgactgggatgttgatttttgatcagaccgtggcttgtgcaggtctgaccttaacggcggccaaagcagctaacttcgatgcccaagcagctttttatgaaggcaattatcggccggactttatgcctaccacggcgaaagtcatgattgagttggtttatgatcaacaaacgcggaaggttttgggtggtcaactaatgagtgctcatgaagtttcacaatcagcaaatacgttgtccgtagtgattcataatggtaatacgattgatgaattagccttcatggatatgctattctcacccaactttgatgaaccgtttaattacttgaatttagtggcgcaggctgcagtagatcaggaacatggctatcgtcggaataattaagtttttgcactaattatggtcagaaggtgctggttgttaaaatcaagaacagccagcttagacccgctggaataagttcagattagcgtaaacttgtttggtgagtgcgtccgataccgttctccaggtattgctgccaattgctgggatggtattcaaaacgaatgtgctacgttaacgtttgttccaagtctaacggagtagatggttcagcgacagattagcttgggttaagcggccgttcatctgccactcgagtggtttcctggaagtcagacgaggacgcgcatatgctgacgggcaacaatccaactaactagcatgttttaataataagtgctggtgaatccataaaaataatgagccaaataaggtgactgccaaacagtgggtttcataacctgactgtttggcggccacctttatattatttgaaagtgattggtcaagcatagtcgttgggatcagcggctaggggttggtaagcgtccatttcggtgtcgcggtagtcccaccattcgttaacgtagccgacaaagcccgcggcggtcatggcggtgtccagcagctgataatttttttcttgaagtgcggttcgaggagcgtcacggtgagcagctgccgtgaagtcatcgaaggcagttggcattgttaactcactaccatcaggatgggccagggtcaaatctaaggtgacgcctttttggtggctgaaattaggattaggctgggcaacaaattctggatcaggatacacttcaaataaacggcgctgggcgcttacgggccgataagcatcccagactttgagtcgataaccttgttgtttaaccagggcgcttgccttggcgagtttgtgggccgtgccagtgcgaacaatggccgtggtaaagtcgtaaatcacttgatgagtaaagttattagtggtggcataacgcaggtcaacgatgatttcggagtctaagtgttgaatattggtgaaaccagttaaagcttgatccatagtaggtcctccttagaatttagttatgcttattgtatctgattggccgatattttaccgactaaaagggttgcaaatggtgtcaaactttctgctagctttcaatccgggtccctgatatgatggaaagcggtgtaaatttaacaattgattgaagaggtgaggtcgcatggatcgacaaacacgacgcgcaattttaattttagtttttagtgagtttttagtttgtttagggattagtttagttattccagtcatgccgtttattaaaaatgaactgcatttaacggctaccgatatgggaataatgaatgcgctattcgcattggcacaatttgtggcctcacccattattggccgggtttcagacaaagttggtcgcaagcccgtattaacggtagggctagtcttatatatggtctcggaagtactatttgcgctaaccaaccagctgtgggtctttaatatttcccggattgttggtggcttatcagcagcgatggtcgttccgacggcgatggcgttagcatccgatattacgaccaaacgacagcgagctaaagtaattggctggttatcggcggcctttagtggtggcttgattttaggccccggtatcggtggggtattggctggtattagttataagacgccgttctgggttgctggtgcattgggattactcagtgccattgtgctcgtcattctgttgcctgcggatcgtcagattgatcctgatcgcgaagcaattacggccacgacaacgacgaccaatcatccgatgacgcgggcattttggaccgtcccgattattatattatttacgatgattttagtgtcttcctttggcttacaggggtttgagagcatttatagtatttacgtgaatgaagtctttcactttagtctgagcaacattgcgttggtcttgactttaaatggtttgatttcgctcttcctacaggtggcactatttgatacctttgtccagcgttggggcgaacggcgggtcattcgggtgtgctttgcagctgcggcgctctgcactatctggattacgcaggctcattcgaaagttgctgtcatggttgcaacgctcgttattttttcggcattcgatcttttgcggcccgctattacgaccctattaacgaaagcaagtgaggccaaccaggggctaatcaatgggcttaacatgtccttaacgagtgttggcaatatcgttggcccaatcatgtcggggatgttactagatatgaattatcactatccatatctagtggtggccggattcttgattgtctcttatttaatggcgtttatgttacgattaccgaaccaggttcattcacatcagcaagtttaacattgcataacagttaagctaatcagcgaaagcgctccgggtttgcgtccccggggcgcttttgttacacttaggccaaattagattgaaggatggtgggctgcaatgggaatgcatcaatattttcagagcttaagtaatttagaaacgattcaacgggccccgggtttttttaagtatcagaatcattcagttgcggcgcattcatttaaggttgctgaagtcgcccaatttttaggtgatgtggaagaaaatgccggacaaattgttgattggcgagccctctatgagaaggcgctgaatcacgactataatgagcggtttatcggggatattaagacgcctgtcaagtacgcaacgccgacgctacggacgatgctggcggatgttgagcataaattatcacaaaattttgtgcaaaatgagattccagctgagtttcaggcagcttattcacggcgtctatcagaaggcaaggatgaaacgctagaaggccagatattgtcggtagccgataaaattgacctattgtatgagtcgtttggtgaaattcaaaagggtaatccggaaccagtttttagggatatttatcaagaaagtttaaaaacaattgtcgcgtttaaaaagatgactagtgttcaatatttcttaaaagcagtgctaccagagatgttagcggaaccgttcacgcatcaggatcaattacaggcgctgacgacccagattttaacggccgggccgcaatccgattaatggcgaaagtatgttcgatgtgctaaaattaaatgcgatttgaatgtgatagggaagcgcgggcttgcctattttttatggtgcgacagtaagatttagttatcaatagatgatatgaacgggtgaccgtttaaaaggaggactacgtttgattgatcgggtagataataatcattttgacttagtttcagattaccaaccaacgggcgatcaaccccaagcgatccagcaattaaccgctggcattgaatcgggagaaaaagagcagatcttgttgggggcgaccgggaccgggaagacctttacaatttcgaacgtgattgcaaaggtgaataagccaacgttaatcttgtcacataacaagacgttagcgggtcaattatacggggagtttaagaagtttttcccgaacaatgccgttgaatattttgtgagttattacgattattatcagccggaagcgtacgtgccttcgagtgatacctatatcgaaaaggactcggcaatcaacgatgaaatcgataagttacggcactctgcgaccagctcattattggaacgcaacgatgtgatcgtcgtggcatcggtctccagtattttcggtttaggggatcctcacgagtaccaagatcacgtagtctcactgcgagtcggcatggagatcgaccgcaatgatctgttgcgtaaacttgttgatattcaatttgatcgtaacgatattgatttccagcgggggcgttttcgggtccatggtgatgtcgtagaaatctttccggcttcacgggatgaccacgcattgcgcgttgaattctttggcgatgagattgatcgaatccgtgagattgacgccttaaccggtgaaattgtggctgatcgtgaacatgttgcgatcttcccagcgacccactttatgacgaatgatgcgattatggaacacgccatcaagggcattgaagatgagttggacggccgcctgaaagaattgacagccgatggcaaattgttagaggcgcaacgactcaagcagcggacgacctatgatgtcgaaatgctcaaagaaatgggctacactagtggtatcgagaactattcacgttttatggatggccgtaaacctggcgaaccaccgtatacgttactggacttcttcccgaaggactttttgctcgtggtcgatgagtcacacgtgacgatgccccaagttcggggaatgtataatggggaccgagcacgtaaacaaatgctagtcgattatggcttccgtttgccaagtgcgttggacaaccggccattgaaacttgaagaagttgaacagcatattaatcaagtggtttatatgtccgcaacgccgggcccttacgaaatggatcggaccaagcacgtcgtccagcaaattattcgaccaactggtttattggatcctacgattgaggttcgaccgattatgggtcagatcgatgacttagtgggtgaaatcaataagcgcattgaggtcaacgaacgggtctttatcaccacgttaactaagaagatggcggaagatttgaccgactactttaaggatttaggcatcaaggtacggtacttgcacagtgatattaagacgttggaacgaacgcagatcatccgcgacctgcgtctgggcaagttcgatgtgttggtcgggatcaacttgttgcgggaaggaattgacgttcccgaagtttcactagttgcgattttggatgcggataaggaaggtttccttcgtaacgagcgttcgttgatccaaacgattggtcgggcggctcgtaatgagcacggttcagtgattatgtacgctgacaccacgactgattcgatgcaggccgcgatggatgagactgcacgtcgtcgagcagtacagatgaagtacaatgaagatcatcacatcacgccacatacgattaaaaaggccattccagagctaattgcttcgacgaagaccactgaagacgcgggtaagaaggatgacttcttagaaaccgactttgatgatatgactcgtgaacaacaattagatatgattagtaagttggaagaacagatgaagaccgccgctaagaagctcgactttgaacaagccgcaacgctgcgtgatacggtcatggaattgaaagcacaaattagctagcaggttgctggcttgagattgaggaggcctttttttggcaaatgataagattgtcattcacggtgcgcgagcccataatttaaaagatatcgacgttaccatcccgcgcgacaaattagtcgtgattacggggctgtctggctcaggtaagagttcgttagcgttcgataccttgtacgcggaaggacaacgtcgctacgtggaaagtttgtcagcgtacgcgcgtcaattcttaggacagatgcaaaaaccagacgttgattcaattgatgggcttagtccggctatttcgatcgatcagaaaacaacatccaaaaacccgcgctcaacggtcggaaccgttacagaaatcaatgattacttacggttactgtgggcccgagtcggtgaaccgatttgcccgaacgatgggacaccgattgcgagtcaaaccgttgaacagatggttgatcggattcagaaattaccggaacgaacgaagttgcagattttatcaccaattgtccgccagaaaaagggcgagcacaaaaagatctttgaaaagatcaagcgtgaaggtttcgtgcgggtccgtgttgatggtgatattcatgatatcagtgaaacttttgaactgaacaagaatcaacaacacacgattgaaatcgtcattgatcggatcgttgtgaagtccggtgaccgttctcggttatttgattcttttgaagcggcgttgcgattaagtgggggctatgcgattgcggatgtgatcggtggcgaacccattatgttctcagaacattatgcttgtcctatctgtgggtttactgtgggagaacttgaaccacggttattctcgtttaacgcgcctcagggagcttgtccagactgtgaaggtctcggaatcaagctagaagtcgatgaggaccttgtcgtacctgataagtcgctgacgttggctgaaggtgcgttagcgccttggaatccaatcagttcacagtattatcctgaaatgttgaagcaagcttgtgaacagttagaaattccgatggatgtgccgtatgaagacttatcaaaagctgatcaacaaacggttttgtatgggtctaacggaaagacgttccatttccactaccagaacgactttggtggtgttcgcgatgttgacgctgtgtttgagggcgttatcaacaatgttgaccgccgctaccacgaaacgaatagtgatttcacccgcgatgtgatgcgaaagtatatgacggaactcacttgtcagacttgtcatgggttccgcttaaatcgcaaggccctgtctgtcaaagttggtggcgaacatatcgggatggtctctgacttagccattggtaaggaactcgatttctttaacgagttgagcttatcagaacaaagtctcgtgattgctaaaccaatcttgaaggaaatccgcgaccggttatcattcttgcaaaatgtgggactggcgtacttaacgctcagccgttctgcacggacgctgtctggtggggaagcccagcgaatccggttagcaacacagatcgggtcgaacttgtccggcgtgctctatatcttggatgaaccatcaattggattgcatcagcgggataacgaccgcttgattggttcacttaagaagatgcgcgatctggggaatacgttgatcgtggtcgaacatgatgaagacacgatgcgggccgctgactatatcgtggatatcggcccgggtgccggtgaaaacggtggtgaggtcatggcggccggaacgcccaagcaagtggctagctcgcagaagtcactgaccggccaatatctatcgggcaaacggtttatcccactacctgaaactcggcgtccgggtaatggtaagaagattcgtatcactggtgcggccgaaaacaacctcaagcaaattgacgttgattttccactaggcgaatttgtcgtggtaacgggggtttccggttctggtaagtcgaccttggttaacgatgttttgaaacgcgtattggcacagaagttgaatcgtaattctgaaaagcctggtaagtataagagtgtcaggggtattaagaatattgaacggttagttaatattgaccaaagtccaatcggccgaacaccacgcagtaatccggccacatatactggtgtctttgacaatattcgtgatttatttgcacaaacgaatgaagctaaattacgtggttacaagaagggccgctttagttttaatactaagggtggtcgttgtgaggcttgtcacggtgacgggattctaaaaattgaaatgaatttcttgcccgatgtctttgtaccttgtgaagtgtgtcatggtaagcaatacaattctgaaacgttggaagttgaatacaaaggcaaaaatattgccgatgttcttcaaatgaccgcttcagaagctgttaagttctttgaaccaattccaaagattcgacggaaactacagaccttggtcgacgttggtttgggctatgttaagttaggccaacccgccacgactttatcaggtggagaagcccaacggatgaagttagcttccgaattgcacaaacaacagtcggggaagaatttctacatcttggacgaaccaacgactgggttgcacagtgaagatattcggcgcttgattggtgtcttggatcggttggtggatgcgggtaataccgtgttaatcatcgagcataatttggatgttgtgaagtcggcggattatttgattgacttgggcccagaaggcggtgacggcggcggaacaatcgttgctactgggacaccagaacaggtcgctgaagtggctgaaagttatactggccaatacttgaagcccgttctagaacgggatcgagcacgtgaagcaactgcacctgctaaataacgggcaatgtgctacacttgagtttgtaatgtaattttaatttagaggagttgtttgtacatggctaaagtagaaagttttacattagatcataccaaggttttagcaccttacgttcgtaaaattacggtggaaaatgggcctaagggtgatgccatcactaattttgatttgcggttagttcaacctaacaagaccgctattgatacggcgggcttacacacgattgaacatatgttggctgggttattacgtgatcgtatggatggcgtgattgactgctcaccatttggttgtcggactggttttcatttgattacctggggtgaacatgacaccgttgaagttgctaaggcattgaagtcctcattagaattcattgctggcccagctaagtgggaagacgtacaagggacgaccatcgatagctgtgggaattacaaggatcattctttattctcagctaaggaatgggccaagttgattttatcgcaaggaatttcatcggatccatttgtacgcaaagtcgttgaatagaccaaaatataaaaagtaatggtggtgccggccaccaattaaaaagagcctagcttttcataacgaaaagctaggctctttttgctgtttactgacattgtgcgagcttagcggtcctgaatcgtgggaaaacaatctaagattagattaaggtagtgtttcaaaaataacaaaaaatatactgatttcggtgaatgtctgcataaaaattctacattttagtgaatattgcacaaatgatgaatatatttaaaatattattgaataaaattaaattgggtggtacgatactgtcattgataaaagcaaagataaaaatttcggaggtacaaatcaatggtcaaacaaaatgataaaattattctcgcttattctggtggtttagatacgtcggtcgcaattagttggttgaaggataagggctatgatgttgtggcctgcggaattgatgttggtgaaggcaaggacatggatgcaatcaaagaaaaggccctaaaattaggggctgtttcatcatatatgattgatgctaagcaagaatttgctgaagaatatgcgttaattgctttacaaggtcataccttgtatgaaggtgaatatccgctggtctcagcactttcacgtcctttaattgctaagaagttagtcacattagccaagcaagagcacgctgttgcaattgcccatggttgtactgggaagggtaatgatcaggttcggtttgaggttgctatccacgctcttgcaccggatatcaagatcgaagcgcctgtacgtgattggcactggtcacgggaagaagagatcgattacgctaaggaacacaatattcccgtaccaatcaatttggacagtccttactcgattgacgaaaacttatggggccgggccaatgaatgtggcattctagaagatccatggcagggcgcgcctgccgatgcgtttgaccggacgaaggccttagctgatacgccggatacgccaacgactttggaaatcacttttgaagctggggtgccagttgctttagatggtgaatcacttaacctagctgatttaatcatcaagttggatcagattgctggtgaacatggaattggtcggatcgaccatattgaaaaccggttggtcggtatcaagtcacgggaagtttacgaagcaccagctgcaacggtattgctcaaagcacataaagatttggaagatttgacgtttgagcgtgagttagctcacttcaagccaatcattgaacaaaagcttgcggatacgatctacaacggtctttggttctcaccattgatggaagcgatggttgccttcttaaagcaaactcagcaagtcgtcaatggggtagtccgggtacaactcttcaagggtaacgttattactgaggggcggaagtcacccaactcactatatgatacgaacttggcaacctatacatcagcggattcatttgaccaacaagcggcagttggtttcattaagctatggggcttaccgacgcaagttaatgcccaagtccaagcgaaggctcaggccgaagctaagactgataaggcacacgcctaatgagtaccaagaagctatggggtggccggtttaccgaaacgggtgctaagtatgttgatgactttggggcatcaattagctttgaccagttgcttgccgcagaagatattgctggttcactggcacacgttaaaatgttgaagaaaactggtattttgcctgccgctgatgttgatcaaattgttgctggtttggaaaccttggctgagcgtcaaaaacaaggtaagttggaattttcaacggtcaacgaagacattcatatgaatattgagtcattattgaccgaagagattgggccagtcgctggaaagttgcacacggcccggtcgcggaatgaccaagttgccacggatttccacttgtacttgaagcatcaattaccactaatattggaccggctacatgaactggaaacggtattggtcgataaagcgagtgagaacgtggagacggtcatgccggggtacacgcatttgcaacacgcccaacccatctcgtacgcgcactacctgttagcttattaccaaatgttcaagcgggacatggaacgcttcgagtttaacctgaagcataccgatatttcgccattgggagccgctgcacttgctggaacgacttttccaatcgaccgggaatatagtgcgaaactattaggattcagtgaagtctatcataatagtttggatgccgtttctgaccgggacttcgtgcttgagtttctcagcaatgcttcgatcctgatgatgcatctctcacggttttgtgaagaaattgtcagctggagcagttatgaattcaagtacatcagtttgagcgatcagttttcaacgggtagttcgattatgccgcaaaagaagaaccctgacatggccgaattgattcggggcaagtccggccgggtttacggcaacttgatgggattgctaactgtcatgaaagggattccgctcgcttacaataaggatctgcaagaagacaaagaaggggcgtttgatacggtcacgaccgtgttaacgagtctccacgtcttcaccggcatgttggcaacgctgaccgttaatgaagatcggatggctgatgccacgactaacgatttctcaaatgcgaccgaactagccgattaccttgcaaacaaaggaatcccatttcgggaggcccatgctattgtggggaagctcgtcttggatggcttgaaaaaacagcggccgttgcaggatattccactcaaagaatatcagtcaatctcaccgctgatccaagaagatgtctaccatgatttgaacgcaaaagttgcggtggaacggcggcattcgctaggtggtactggttttgatcagattagacaagaattgcaacgggcacaaacgcaattgtcagcctatcaatctgaaaccactgattaattaatgcttatcaatttgaccattgatattatttttaaagatgacctctaagtggcggagcctcggcatttagaggtcgtttttagtgctatcgacattttgaaaaagcattaagctaacataaagtctatcagaaaaattggaaactcttacattaactggtaagatggaattaatatcggatatgggagatgttgatgtatgtttaatgatcatcgctgggggtttgattggactgaattcatgacggggatcgttttctggatcgccgcttactttgtcatcaagcaaccacaagcagcacttttaagtttagtctttttatttgccatcgccgcaattattagcggggtcaccacaatcggtgggtacacaaaactacgccgtgaaacagggttgcgggcaaattttgcccttgtgtttgcgattattgatattttagtggggttattatttttattccacgcaccgactggggtactggtactcggttacgtctttgccttttggttcttgatcgattcgattgaacggctgaccgtagtctcacatctacgcgtctttggaaccgggtattttgttctatctttaatcttggatattattagtttggcattgggaatcttattagtaatcaatccaatggttgctgtgattagtttcaacgtactggttagtttctactttgcagtttttggcatcaacgcaatcttgattgcttttgctcggcgtaactagcttggcagtattgactcgttagcgatacttggcgctcactattggtggtgtcagggtgttgttaaggggtcttttttttgcgcgttaatgtaatactgtttggaatcaaatggcgggtcgaagtggcacgtcagtagaaatgacacacccggtgtgttatactaccaacaatatggactagagggggccaatacagcatggcagaatcattacaactagtaattatttctgggatgagcggtgccggtaagacggttgcggttcaaagctttgaagacctgggctatttttgcattgacaatatgccaccagcgttattaccgaagttctcagaattagttgaggagtcgggtaaaataaagaaagtagcgttagtgattgatttacgctcgcgggctttttacgacgaaattatggatatgttggctaacttagacaacacggactttgtgtcgacccggattctgtttttagatgcttccaacgaagaattagtgtcacgctataaagagacgcggcgttcccatccattagccatggaaggtcgcgtcatggatggcgtgcgcaaagaacgagaattattggcgccattgaaagatcgggcttcatacgtcattgatacgtcgacgttgacaccacgtgaattacgcgaatcgatttttgataaattcgaaacggatcaggatgagacttttcatattgaaatgctatcattcggttttaaatacggactcccgattgatgcagatatcgttatggatgtgcgcttcttgcctaatccatactacattcctgaattaaagaagctgacgggactagataaacctgtggcggattacgttatgcagcaaccagctacggaagctttctaccagcagttcttgagtatgctggaaagcattatgcccggctatgaagccgagggcaagagtagtttgacgattgcgattggctgtacgggcggtcaacaccggtccgttgccttgacgcaacgtatcggtgaagcgctggctaagcactacaaggtgcacatcagtcatcgtgatattgagaaacgaaaggaaactgttaatcgctcatgagaaaatacacatttaagactcagcggcctaaaattgtggtgattggtggaggaaccggtttgccggttgttctgaacggcttgcgtaagcaggcagtcgatattaccgcagtggtgacggtggctgatgatggtgggtcatccggcattattcgcaattacgttaacgtggttccacctggtgatattcgtaatgtaatggtggcgttgtcgagttggccggatttgtataaagatatttttcagtatcgtttccagggtgatgatcaattttttgcaggtcatgcgattggtaatttaattattgcggcactaacggaaatgaaatccggggtgtttgacgcggtgcaggaattatcaaatatgatgcaagtagatggtcatgtttacccggcagccaacgaggcactcacgctacatggtaagtttagtgacggtactgagttagtaggtgaagccgaaattaccgcggcccataagtcattggaacgcgtttgggtcactgacaagaatggtaaggaaccacaagcagttcaaccagttattgatgcgattatggcggcagatcagattgttttggggcccggtagtttgtttaccagcattctaccgaacctaacgattggaaatattggtcgggccgtctgtgagtctgatgcagaagtggtttatatttgtaatattatgactcaaaaaggtgaaacggataatttctccgatgctaatcatgtgcgggtcttaaaccgccatttggggcagaactttattaatacggtgttagttaacaccgaaaaagtgccagaagattacatggattttcataagtttaacgaagtttcaaagcaagtgagtcatgacttccgagggttacgtgaacaaaactgtcgcgtaatctcatcgaacttcttgaaactccgtgataatggggcctttcatgatggcgaccaagttgtcgctgaattaatgaatctagtcggtcattccgacgttttcagataagggggtcgtggcatgtcatacgccagtgacgttaagaaagaattgactaacctcgctgtccatcgcgagaatgctaaggctgaattaatggctttgattcgaatgaatggggcgatcagcattgctaatcatcacttcattttgaatattcagacggaaaatccggccatcgcgcggcgtatttaccggctactcaaacaattttatgacgtcgatagtgaattgattgttcggcgcaaaatgaaattaaataagaataatttgtacatcgtacgattgaagaccggtacggacatggtactcgctgatttgggtattttaaaggattatcaaatcgttgaagtggcaccaactgaagtgttaacggatgatgctgcggtgcgttcttatttgcgtggcgcctttttagcgggcggttcggttaataatcctgaaacttcccggtatcatttggaaatttactcactgtatgaggaacataatcatatgatctccgagatgatgaatcagtatggcttgaattcacgaacgactgatcggcgtggtggtttcattacgtacatcaaggaagcggaaaaaattgccgatttcttgtcgttggttggtgcgaccaatgccatgcttaagtttgaagatattcgaatcatgcgggacatgcgtaactcggtcaatcggttggttaactgtgagaatgccaacatggataaggttgccaatgcctctagcaaacagattgaaaatattttattgatcgatgctacggtgggattacaacagttaccaccaaaattacaagaagtcgctgttgcccggttggaacatcgtgaagttagcctcaaggaactaggaacccttgttccgggcgggcctatttctaagtctggaatcaatcatcggctgcgtaaaatcaatcaatttgcggaacaattacaaaaagatgcttagttgtcgataaggatggcttaagcatgagttttgttgaaaagcttgctaaccactttagatggtgttagcggcttttttgggttgaaatggattgattgtcgttcgccatactcgaaaagcacttgacaaaagtaagtgcaactatttatactgaacacatcttattgaaatcggagagacgtaattatgcaaaaatcaacaatgcaaatgatgatgtgctgcccatgttgtgaatcaaacaacatggctatttgcgttgaattacaagcgtctctgcatcaaaaataacgggattgagctcaaatcgttaattttgaaacgcctgcttggaatctgacgagattctgaacaggcgttttttgttacaaccgatgggaataagtagatcaacacatcaaaatgggaatgtaaaggggcgagaagtttgaagaagcgatcagtgttagcagtggtaatgagcctagtattagtgacggtgctggctgcgtgtgggaagcacaatagccagtcttctggtaatggcaagtatgcaagtagtcaggttttaaacttgtcgtaccctagttcattggattcaatcgatatttccaatatgtcgggatatggcagtacgggtaatatttttgaaagcttataccggttaggaaagaatggtagcattacaccgggattagctaagtcaactaaggtttcaaaggatggcaagacgtatacctttacgattcgcaatgcaaagtggagcgatggttcgaagataaccgcgcaagactttgtctattcttggaaacggaccgtcaccccagcaactaagtcacagtatgcctacctcttctcaggggtgaagaatgcggatgaaattgtcgctgggaaaaagtcaccaagtacattgggcgtcaaggcgcaaggcgaacatacttttattgtgactcttgataagccaattacttattttaagaagttaatgacctacccgttgtttggaccaattagtgagaaagcggtcaaaaaatggggtagcaaatatgccactaaggctcagtacatgctctacagtggaccgtttaagttgactggctggactggaactaataatagctggcagtttgtaaaaaataatcagtactgggataagaaagctgtccacctacaaaagatcaactacacggtcaatgagagtactacgacaacattgaacttgttccaagaaaagaaacttgatctaacgcaattagcgagtgaacaagttaagaatatgaagagcagttctgactataccacgtacccttattctatcaccgcgtttctggtttataatttccaagacagtaatgcgacaatcaaaaaggcgctcaataacgctaagattcgtcaagcaatttcattgtcgatcaatcgcaagacgttagtaaagaatgtgattggtgacgcatcaacggtctcaaagacgtttgttcctcaggatttagttaaagatgctaaaactgataaggattttgcagatgaatcaacggttaagaattcaacgtcatataacaaagcgctggcacaaaagttatggaaacaaggccttaaggaaacgggaattaagaaattgtccattcagttattagcttctaatgacgaacctaataagccgatttcacaatacttgaaatcagcattagaaaagaatctcgatggtttgacggtcaacttatccaacattccatcaaaggtagcttcaagtcgtgctcaaagtggtgattttgacctttatctcagtggttggggtgctgacttcaacgacccaatctcgcatttgcaaattatgactaataatagtggttataattacggaaaatataacagcagcacgtacaatgcgttggttaacaaggctcaaaaccaggatgccaatgatactagtgctcgttggcaagatatgatcaacgctgagaagacgatcatgaaggaccaaggaattacgccattgtatcagacggtatactcttatttacaaaatccaaaggtaaagggtattattcataatactgctgggacacagtggaattataagtatgcttatattgccaaataattaactgattgagggacgctcatggtaactggtcgtttagctgttaccttagtaggagcgccaggtccatacgtgccttgatcaaaacaaaatagcggtccatttcgacttgtcagagtgtcttgacgaatcgaagtggaccgcttatttatttcgacgaatggttctacagtgcttgagttgtcacgcaagacaactacactgattggtctatgctggtgttacgtcgttaaccacgtacttgattggctgatgttgggccatcgcaatcacattctccgcgacaatggtagccatgccatcgcgagcttcgaccgttgcgttgccaagatgaggtgtcaagatgacgttgttcatcgtggccaaaccaggtgtgacttgcggttcatgttcgtagacgtcgagtgcagcgccagcaatttgatgttgttgcagcgccgtcacaagtgcttgctcgtcgacaattggcccccgtgcggcgttgatgaggagcgccgtggacttcgttttgctaaaagcagcattatcgattagatgcgttgtttgtgtggtaagcggcagatgtaaagtgacgatgtcggcacgctgtaaaagttcatcctgggagacaaaggttgcgccaagttgcgtttcacggctaatcggtaggcggtggtgttggctgtataagatgggcatgtcaaaggcgtgtaatcgtttggcaacagcttgaccaatttggccaaggcctaagatgccgagtgtcttgccttgtaagttgtggccgagaaagaacagtggcgcccaaccgttaaagccgctagttcgcattaagtgatcgccttccacgatacgatgcgctaggctgataatcaaaccgaccgttgattcagcggttgcgaccgccgaaacgttcggcgtgttcgtgactggaatctggcgcttagctgctgccgcgatatcgatgttattagtgccagcaccaaaattagcaatcagtttaaggtgtggggcgtggtctaagacatcttgatctacttgagttgagagtggggtaatcaaaaagtcggcatcagcgactcgacggatgagttccgcgtgactgatcaggttatcgccggtataagtatcaatgactaactgactttgtaaaagtaacgtattagcttgggctggaagctgaccagcaataaagacttttgtcattatagagactcctttttacttttaagttcaaggacaagtaatattgtccgggtagtaatccctgcttatgtgcagtatgggctattgcaaaacgaatgacaagaaaacgagcaaaaaaactgggccaacgtcaagttagcccagtcaaagatattagcttattttaatttgttgttttccataatatcatcgatcaaaccgtagtctttagcctcttgtgcgcttaagtagttatcacgttcagtatcatggttcaacttttcaacggattgtcccgagttgtcagctaaaatctggttgatctttttacgagtcttcaagatttcttccgcaacaatttcaatttccgtttgttgaccttgagcaccaccagatggttggtgaatcaagatttcagagttaggtaaagcaaaacgcttgcccttagtaccagatgaagctaagacgctggccatggaagcagccatccccataacgatggtttgaacatcagatttgatgaagttcatcgtatcgtagattgctaagccggcagtaacgacaccacctggtgagttgatatagagatagatgtccttacctgaatcttgggcatccaagaagagtagttgggcaataatggcgtttgccatgttatcttcaatgggaccggataacataatgatacggtcctttaatagtcgtgaatagatgtcataagcacgttcgccacgtgatgactgttcaataactgtaggaactggatacatgatttgttagcctcctaaggttgcattatttgattagctgattgctaatataaatgtagtttaccgctaaggtcagtgaaggtcaaaagaaaaacctcaaaaacagaattccgtttatgcagttaacgtggtatacttaggtttctatcataatacggcttgagattgggtgaacccaatctcttttttttcgacgattttagttagtaggccttggattaagtgttgcgtctaccttggcttgaaaacgatgttctcttataataatgattcaagattaagcagtaatgaacttgcatattcagcactaatgtggtgatttaaaagtagtcgacccgcataattttattatcgcgatagtaggtgaatcaatttactgatagtgacccacaaagatgagtctaatagaagttggaaattcgcacgtgagccgacatattaaacgacttgaccttgttgctggactcaagttgctcgcaacgaattaatcagtatcggatgcatgaatgaaatttaccatgattaaaacgattctataatataataacaattgtagtaattattatttgaatggtgtaagtttagctgttattaaatctactaaacgactacactggtatatggtttacttgaactgattactttttgattatttttacttggacgagcgggtataggtactattactgaccccgaaaggatattacttgttgtttggtttaaattaagttactatatggagatgtgactggtatagtccagtagttgtcacttaaataaatgcacaaaaaaagctgagaatcatttctcagctactgatgcgcccggagggaatcgaacccccatctcaagaaccggaatcttacgtgctatccattacaccacgggcgcctaaacaacatattatattctagcgaataatggataaaaacacaagggttttacataaaaatttattcagggaggtatttttatggcactgggaccaggatttcgccagcaacagcggcaatcacagaagttagcgatgacccagcgactacaacaatccattcagatgttgcagtttaatgtggaagaactaagagattttctaacgcaaaaagcattagaaaacccattgatcgatgtggatacaaattggaataataatcacgccagtttgaacgcagccaaaaatgtaaccactaaggcggatttcattgagcgtgtgtcgacctctaatcagcattcgttatttgaatacttgttggatcagattcacctaacgatgcgtgatacccatttgcgtcagattgtcctttatttaattgagtacgttgacgtgaatggttatttgcggattgatgagaggcaggttcgacaagaaactaaggcaacgccaattgagttgttggatgcaattaccttattacaacaacttgatccgccgggtgttggggcccggagcttgcaagaagcgctgatgttgcagacagaaaatgatgaccatgcaccgaacttagcctatattgtcttagaagaaagttttgacgagctggttaatcgacaatgggacttgttggctaagaagtatcaggtgacgcttgcggacatttcaagtatttatgattatgtgcgaacactaacacccgtacccggtgcggcaatcgggcaggagacgaccgggtacatctttcccgatttagtggtgacgaatcagggaggccagctggcattgcgaaccgcatccatggctcaaccggtggttaaattccgcagtcggtattatcagcagatggggcagcatgatgatcaggaagttacggaatatttgaaagaaaagaaaagtgagtatgactggattgctaacagtttgcagcaacgcgaggcaaccatttttcgagtgggaacggccattatcgagcgtcaagcagacttcttcttggaaaaaacgacggatttacggccactattgttacgagatgttgcccaacagttaaaagtgcatgaatcaacaatcagtcgaagtattaatggaaagtacattcaaacggacttcggtatgtttgagcttaaacgtttctttaccaaagcggtcagtaaacgtcccactggtggcaaaatcgtttcggccgacagtgttcaacaccgaattgtgaccttgatcgaacaggaaaataaagaaaaaccgctttcagaccaaaaaattgttcagattcttaatgcggaaaatgtcgaactttctcggcggacagtggcgaaatatcgcgaaaatcttaatattccgtcgtcatcaaggcgaaaacaatacttgagaaccgaacgataatttaacgcgccatttggaccagtcggttataagtttaattggggtttcatttgcaaccaccttatgaacctgttataattcatgttgtggtaagagaggtatgcaacattgatttcttagtgaatttgcgttgtgtgctttgttttttgaagtctttgggtcgcttttcgacatagctggaccagacccgtcccactagagagcaggttggatgccatgcattcagatattcaatggattgaggcaattgccccagatatggttgacatgctgagtcgtcgttacttagtattaagaaccattaattggatggccccagttggacgtcggctattagctcagacgttaggtgttagcgaacggacgttacggaccgaaacggatacattgcggaagctagatttgattatgacaaacaaatcgggcatgcaagttacccagcaaggtcaggacgtgttagtaggcctaagtcattttatggatgagctaatgggcattcgccagaaagaacgacagttggcgcaatactttaatattaagcgttgcatcatcgtttctggtgattccgatcgacagttgaaagttattgggaccatgggcgaagaagtgaaccagctattacagcaattattgccggaagggcgtaatattattgctgttatgggtgggcataccatggaacatgtggcaagtcacttaactaataaattaggtgataaacgtgatttgttatttgttccggcgcgtggtggtgttggtgaatcggttgcgattcaagcaaataccatcgcgtcacaaatggcacaacatactggcggtaagttccgctcgttgtttgtaccagaacaggtcagtgaacgaacgtatgaaccactcctcaaagaaccaagtattcaagaggtgctggcgattatcgggcaagctaacgtggtcgtgcatagtatcggtgaagccatttcaatggcccatcgccggaatatgtctgaggatcagatcaaggtgttacgcagtcgtgaagcgattggtgaagcctttggttacttctttgataagaagggtaacgtggtctaccggattccgcggattggattgcaaatcggagaactggcccatcgggagattatactcgccattgcgggtggggcttcaaaagccaccgcaattgccgcgtatatgaagaacattgcacctaaacagacgtgtttgatcacggatgagggtgcggctaacttgattttaaaaaagtaatcttctatagtgaagttgctttttaaaataaaactatttttatttccacaaggaggaaattctagtatgtctgtaaaaattggtattaatggtttcggacgtatcggtcgtttagcattccgtcgtatcttagaacttggtgaaaagtcaagtgatatcgaagttgttgctattaacgatttaacttcacctgcattgttggctcatcttttgaagtatgactcaactcatggtactttgaacgctgacgtttcagcaaccgacgattcaatcgttgttaacggtaagaactaccgtgtttatgctgaaccacaagcacaaaatattccttgggttaagaacgacggtgttgacttcgttctcgaatgtactggtttctacacttcaaaggctaagtcacaagctcacttggacgctggtgcaaagcgtgtcttgatttctgctcctgctggctcagacttgaagaccatcgtttacaacgttaacgatgacatcttgactgcagatgaccgtatcgtttctgctggttcatgtactactaactgccttgcaccattagcattctttgaaaacaaagaattcggtatcaaggttggtactatgactactatccatgcttacacttcaactcaaatgttacttgacggccctgtacgtggtggtaacttccgtgctgcccgtgctgccggtgtaaacactattcctcattcaactggtgctgctaaggctcttggcttagttatcccagaattgaacggtaaattacaaggccatgcacaacgtgttggtgttgttgatggttcattaactgaattagttgctatcttagacaagaaagttactgctgacgaagttaacgccgcaatcaagaagcatactgaaggtaacgaatcatttggttacaacgatgacgaaatcgtttcatctgatgttatcggtactactttcggttcaatcttcgatcctactcaaacagaagttacttctgatggtgacaaccaattagttaagactgttgcttggtacgataacgaatacggcttcacttgccaaatggtacgtactttattgaagttcgccactctctaatatttgattagatagttaagaactttaaaaccgcatatggttttgacggcggggggaggcaaaactcctcttgccgtttttttaatttcagcagtcacgaattctaggaggattttaacattggctaaattaatcgtttcagatttagatgttaaagataaaaaagttttaattcgtgtcgactttaatgttccaattaaagacggcaaaattggtgacgacaaccggatcgtcgctgccttaccaacgatcaaatacgtgattgaacatgatggcaaagccatcttattctcacatttaggtcggattaagagcgaagacgacaagaagggcttaagcttacgtcctgttgcagaacgtctttcaaacttattaaacaagcctgttaccttcgtacctgttactgaaggcgaacaacttgaaactgccatcaacaacatgaacgacggtgacgtcttagttgttgaaaacactcgttttgaagacgttgttaacggcgaacaagttaagcgcgaatctggtaacgatcctgaattaggcaagtactgggcttcacttggtgatgtctacgtcaacgatgctttcgggactgctcaccggagccatgcttctaacgttgggattgcttcaaacatggatcaagttgccgctggtttcttaatggaaaaggaaatcaagttcttaggtgacgcggttgacaatcctaagcacccattcgttgctatcttaggtggtgccaaggtttctgataagatcggtgttatcgatcacttaatcagcaaagctgacaagatcatcatcggtggtgggatgacttatacgttctatgctgctaaaggcatgggcattggtaactcacttgttgaaaaagacaagattgaattggctaagtcaatcatcgaaaaagctggcgacaagttagtcttacctagcgactcaatcgttgctgaaaagtttgataacgatgttcctagcaaggttgttgaaggttcaattcctgatggctacatggccttagatattggtcctaagtcaatcgaagaattcgaagatgttttacgcgacgctaagaccgttgtttggaacggaccaatgggtgtcttcgaaatgagcaactacgccaagggtacgcttgaaattggtaagttcttaggaaccttatcagacgcaacgaccatcgttggtggtggggactcaactgccgctgttaagcaacttggcgttggcgacaagttaacccacatttctactggtggcggtgcttcacttgaataccttgaaggtaaggaattacctggtattgctgctatttctgaaaaataatctgttctccgaaaggaaggtttatcgtgcgtacacctattattgccggtaactggaaaatgaacaaaacagctagcgaagctttagctttcgttaatgctgttaaggatcaattaccagatccatcaaaagttgaatcagtcgttgctgccccagcccttttcttacaggaaatggttgaagctgccaagggttctgatttaaagattgctgctgaaaatgcttattttgaagatgctggggcatttactggtgaaacttcaccagctgccttagctgacttaggcgttgattacgttgttattggtcattcagaacgtcgcggttatttccacgaaactgacgaagacattaacaaaaaggcacacgctatcttcaagaacggcatgaagccaatcatttgctgtggcgaatcattagaacaacgtgaagccggcgaagcagaatcatgggtttcaggccaaatcaaggctgctttgaaagacttatcagctgaccaagtaagttcattggttattgcctacgaaccaatctgggccatcggtactggtaagactgctacgagtgaccaagctgaagaaatttgtgcggttgttcgtaagactgttgctgacctttactcacaagaagttgctgataaagttcggattcaatacggtggtagtgttaaaccagccaacgttaacgaattaatgggcaaagatgatatcgacggtggtttagtcggtggtgcttcattacaacctgattcattcttggaacttgttaattatcaaaataactaataatagttattgcaagttgattgacaaacttctacaataagtgtgaaacaaataacaagccaattttaaggagagaaattaatgtctattattacagatatttatgctcgcgaagtcttagactcacgtggtaacccaactgttgaagttgaactttatactgaaagtggcgcatttggccgcggtatcgttccttcaggtgcctcaactggtgaacatgaagccgttgaattacgtgacggtgacaagagccgtttcatgggcaagggtgttactaaagccgttgacaatgttaacaagttaattgctaaggaaattgttggttacgatgtaactgaccaacgtgccattgaccaagctatgatcaagttagatggtactcctaacaaagctaagttaggcgctaacgctatcttaggtgtttccattgccgctgcacgtgctgctgctgacgaacttgaaatgcctttatacaactaccttggcggattcaacgctcacgttttaccaacaccaatgatgaacgttatcaatggtggggcccacgccaacaacgacgttgacttccaagaattcatgatcatgcctgttggcgcttcttcagttaaagaagctatccggatgggttcagaaactttccacaacttgaaagcgatcttgaacgagcgcggttactcaactgccgttggtgacgaaggtggttttgcgcctgacttgaagaacaacgaagaaccattcgaaatcttagttgaagctatcgaacgtgccggttacaagcctggtaaggatattgccattgcctttgactgtgccgcttcagaattctacaacgaagaaactggcaagtacgacttaaagggtgaaggcgaaaatggtcaatcatttactgccgaagaattcgttgacttacttgacagcattgttgacaagtacccaatcgtttctatcgaagatcctttggatgaaaataactgggaagactggcaaatggcaactgccaagcttggtaagaaagttcaaatcgttggtgacgacttattcgttacgaacacggactaccttgcaaagggtatcaagatgggcgttgctaactcaatcttaatcaaggttaaccaaattggtactttaactgaaactgttgaagctatcgaaatggctaaagaagctggctacactgccatcgtttctcaccgttctggtgaaactgaagacacgaccattgctgacttagttgtcgcaatgaacgctggccaaatcaagactggttcaatgagccgtactgaacggattgctaaatacaatcaattaatgcggatcgaagaccaacttgaaagcacttcagaatataaaggtatccacggtttctacaacttagacgaagctgcacggaacaccattactagcaagtaatttgaagttctaatgaaaacgtcgttccgatgggacggcgtttttattatacataatttaaggaacatctgtttgattttagggtctagggacggacgagtcgtggtagaatagaaacatgcgtattttgagtaaggagcgagcagaatggatgactttcagcaacaaattaatgagtggtctgattggcaaggactgcaactgaatgccggtgcttttgaaccggtgattcaaaaaatttatgccagtgaaaatgagccttataaaacgccagaacccgttgcggataagttggccgcccgctttacggtcggacccacccaaatcgcgatttttccacccagtgaggttatcccccaaactcgggcctattatcaggcggaacgttttggactgacccggatggctcgattgagcttgggtgctccgcgtctattgcatgcgggcttcatttttgataagtaccagttctactacgtgatttatcagccactacaaggtctgacgctaactgaattttgcgcaacggctaagccccttgctaagtcaacgctggggcgccagattgggacgatgttgacgcgacttaatactgaagttcctgcatttgggccaaccgctgcccaatcaaccgagtgggatatactgggccccgactttgttgccgagcgtacggcctggctacaagtacacaccgtaacgcctaatcaatttgttcatggcaatctagtgggcgagaatttaattgtgactagtggtgaattaggtttacagcgattcagtgccgcccatcaagctgcaaaacaaacggaattagtcccgctatttttgcaagcatttaatgatgatactgacttattggctggatttaaggaaacttatcaaactgacgacttagaaaaggatctgttattaggtttgttattacgcctagatggaccacagcagattcaggcattacatcctggagcgcccgtgacgttagcggccgtccagcaagtgattgcacaacgattatcatgattaagagggggaactcatggtggcacagcggccgcacatttcaaaacaacactttgactttacacggttcagctcgattggccgggcactaattgtcggtgtgattgctgggatcgtggttagtatttttcgtttcagcatcgagcagggactgaggttcgttcaatgggtgtacgcacaaattcatacaaattggctactgctctttccatggataggcttgtctgtggctgtggcgttctttgtgggttggttagttaagaatgaaccgaatattaaagggtctggcattccacaagttgagggtcaattagctggcgagcttgattatagttggtggtcagtgctctggcgcaagtttgtcggtggtattctgggcattggttctggactgtttctcggccgcgaaggcccctcgattcaattgggagctacgattggtcagggtgtcgcgtcgaaactcaaacagacgggatcagatcgacgctccttgattgccggtggtgcagcagctggcctttcagcggccttcaacgcaccgattgccagtacgttatttgttctggaagaggtttatcataatttttcaccaatcatttggaccaccgcattagttagtgcgatggccagtaattttatttcgctcaatttttttggccttgtaccagtattacacattccgtacggccataaccttccgttgagtcaatatggcaatctgattgggctcgggatttttctcggtattttcggttatctatatcaaaacgtgacgctgacgatgccaaattggtatgccaagttgcggttgcccagttggttggatggcttggtgccatttttactggtgattccgattggattaatttggccgcagtaacgccagcgttactcgccttgttaggaattttcgtgttacggtttaccttttctaccatttcatatggatctggtttgccgggtggcatcttcttgccaatcttgtcactgggcgccatcttaggtgcaatctatgcccagttcatggttgccgttggttggatgccgacgaacttgattccgaactttattatttttgcaatggctggatactttgccggcattggtaaagcaccgtttaccgcaattttattgattactgaaatggtcgggacactacatcacttgatgccattagcagtcgtttcgatgacggcctacttagtcgtggatctcttaggcggcgctccgatttatgaggctttgctagagaagttaattcagccgcggttaccggaacatagcggtatccaggatcggttagaattgccgatctttgaaggctctaagttagagggccatcaagttcgtgattttaaatggccagcagagtcattattgatcgctattcgccgcggggagcgtcaagtgatcccgcatggcgacaccttgatgcgggctggtgataccttaattatcttgactgaccgggataaccgtgcgtgggtgcgccatcaaatcgcacatttaacggtcgcgacgccctgagcactaaacaaagcaacgaattgttcaggatactggaaaaataaggcaaaatatgttaaattgttatagacatagcggaggctttaggaggcacatttcttgtataatttattgttaacgttaatactggttgtttccgttttgattatcattgcggtgatgatgcaaccatccaaaactaatgatgccatgtcttcattaaccggtggtgctgatgacttgtttgccaagcagaagccccgcggttttgaagcgttcatgcagaaggtaaccgtggtattaggaatcgcattctttatcctggcgttagctctagcatggtactcatcgaagtaattgaccgtcctcctgtgatttcaggaggcttttttttaaggtggtgtaatgatgctgaaacaaccggaaccgtttttctttgaacatggccaacatgccgtcattttattgcacgcctatgcgggaagtgccaatgatgtgcggatgttagcacgagcattagaacgggaagattatacagtttatggcccccaattcagtggacacgcgactgatgatccgcgagatattctcgcacagacgccggcgcaatggtggcaagatacgcaacaagcaatatcatttatgcggcaaaaaggctatactaaaattagtatctttggcttatcattaggtggtatttttgcgacggcggccttggagcgtgatcctcagttgttaggtggtggcacgtttagttcaccactatttgctggtaatcgtagtgacgttgctgaaatgtttatcacgctgagtcaccatcaactggcgcacagtcaattctcaattgccgagcgtgaacagatcttaatggtgttgccagaactggttcagcggcaactgcaggcagtcaatacctttaccacgacggaggttacgagtcacctcagcgctgtgacccaacccttcttcattggtcagggtgggcaagatgaattaattgatgcgacggtggcgcgacaattacgtgatcaattaccacaagtaccagttgattttcattggtatgctgatgctggacacgtgattaccgtcaacagtgcgcatcaccaattggaacaagatgttttaacatatttaaaaactatttataaatgaggtaaataatgtcagaagcaaacttacaagaacaaatcctgacttttttgcaagctcatcccgatcgcacgtatagtgttgaacaactaacggatgaattgcattttacaggcgcaacggcgtttacttttctagtaaaggaacttgcgaatatggaacgtaaaaaattagttagtaccgatgatcatgatcatttcaagctggtccaggaaacgaagactgttgaaggttcatttcatggtaatgacaagggctttggtttcgttcgttacgatcccgatttgcctgatatttacattaatccggacaacacgcagtttgccattaccggtgacgatgttgcggttgaaatcattcgaccagcccgtcccagttccgaccgcggccctgaaggtaaaattgtcagcatcgttaaacggaactatacccagattgtcggtgcgtatacaccaagtacggatgaagacgggattattggttctgtggaaattaaggataagaaattatccaaatatcagttattaatcactgatcagggcttacaccccactgagggggaagtcatcattgctgaagtggctgcttatcctgacgctcagcatccaacgcggatgattgggattgccaagcaggtcattgggagtgttgatgatcctgggatggacgtcttacaagtggtctaccaacacgacgtcccgtcagtgtttccagaagaagtgacggatgaagccaaccggattccggattacgtgactgatgaagaaaaagttggtcgggtcgacattacggaccagccattagtaacgattgatggcgccgaatctaaagacttggatgacgcggttgttgcttggcgcttgccaaatgggaacttccatctaggcgttcacattgcggatgttagccattatgtcaccgagaactctgagttagaccgggaagcattcaaacgtgggacgtcagtttacttaactgaccgtgtgattccaatgttgccacggcggctatcaaacgggatttgttccttaaatcctgatgttgaacgattagccatgagttgtgagatggagattgatcaaacgggggaaatcgttaaccataagattttccaaagtgtgattcggtcacacgcccggatgacttatgacgctgttaatcagattctcgaagcccatgaccccaagactcgtgaaaagtacgcggacttggtcgacatgtttgatacgatgggcgacttacaccgtatcttgtacaagcatcggcggcatcgtggtgcgatcgattttgatgataacgaagctaaaattatcgttgacgaagccggtcatccaattgacattcaattacgggtacgtggcttagctgaacgaatgatcgaaagtttcatgttggcagccaacgaaacggttgcaaaaaactatagtcaacttaaggtaccgtttatctaccgggtacatgaaacgcctgatagtgaccggatgcttagtttctttgaattcgtcactaactttggtgtcagtgtcaaggggagttctaaggatgttaagccgaagatgcttcaagacgttttgaagaaggttgctggtaagcccgaagaagccatggtctcagtcatgatgctgcggagcatgaagcaggcccgatacgctgaccagtcgcttggtcactttgggttggcggcaccgtattatactcactttacgtcaccaattcggcggtatccagatatgatggttcatcgtttgattcgccattatgctgaaaacggcactggtgaagaagcccgggcacgttatcgggataacctaccaaatattgcggaaacgacttctgatcatgaacggcgggggattgatactgaacgcgacgttgattcgatgaagaaggctgaatatatggctgatcacgttggtgagacgtttgaagccgttgttgattccgttatgaaattcggtctgtttgttgaactagaaaataccgttgaaggcttagttcatatcagtacgatggacgacgactactacgaatacgttgaaaaacaattagcgttggttggccgtaagacgaaacggacatttagaatcggccagcccgtcaaagttcaactaatgcgggtcgataaggatcaacgagaagtcgactttaagttattgaatcctgaagaagcgccaaagactgatttattgccaaagcgggaacatcatgataactatcgtggtaataaccggcgtggtggcaataacggtaactaccggcgaaatgggaacaataataaccggaataacgaccatcgtggtggccacaacaataaccatcgtaatggcaatagcaatggtcgccggaacaataataatcataatagcaacaataataatcatagtactaacaacaatcggcggtcatcaactgatcgtcggcgttaatttttaagtaaggggatgtgcggcaatggccaaacaacacggtaagcacccagataccgccctcgctcaaaatcggaaagcacgccatgactacgctgttgaggaaacctatgaagctggcattgcgctgacggggacggaaatcaaatccgttcgcgatcggcgggtcaacttaaaggatggtttcgttcaagttcgcaacggtgaagcctggatgcaaaacgttcacattagtccgtttaaagagggtaaccgttataacgttgacccgttgcggtcccggaaacttttgttgcacaagaaagaaatcagtaagctaggtgcagcaacgatgactaagggtgtgacgattattccacttaagatgtatctcaagcatggatttgcgaaagtcttaattggagtcgctcacgggaaacgggaatacgacaaacggcaagatatcaagaaacgcgaacaacagcgtcaaatcgaccgggttatgaaacattactaggcatcgattacgttagcgttgcatcgctgcaccatacaacgagtatggcagcgtcataaaaaggtcttccaagaattaattcgattcttggaagaccttttttagtatgtgttgttggtggttctgtgccgtggacggacgacggcaagcatatattttatatgtactgatgtagtgctcactgttataaatgttctagatactagcaaaatggttatcaggctataaatattttgcgaaaggtcgggtacaagcacttgcgacttagctggtaattatgttagcatataattgtattgatagttaaacgtgctatttattaattgattcaataaatataattgatactaaactttggagaatgttattattctgatattaatcagatttagtataactcaaattgataataagttaattttgatatgatttattgcatggattcttggggggacatgtatgaatagatttataacgagcaagcagcattataaaatgtataaaaagggacgtttctgggtatttgctggtattaccgtggctacctttactctgaatccactgataagtcgggcagatacggaaacgacgaccgcagccaccgcagctacgaccactgctggggcatcctcatcatccaactcacaggttttaaggactactacgactagtacaacaggggcaacgactcagtctagtgcgacggcgattaatgcggcaacaacaaatactagtgctcaaaaaaaacaggcggttagtggcaccactactgactcaaagactgaacaaccggttacggcagtaggagaaaatgaaaacgaaaccagtaatctcagtacctctgattcggcatcagcaagcagtcaggctaaaactggttctggcgacagtttggaccaaacgtcaaacagctcagtaagtgtcgcatcgagttcacagaaagtcacaacacaaaattctgattatcaaaatgatcaaggaacgggctctgagagtggcattcaatctaatgtgacggacacggtggtggctgatgaatcactacaaactaatcgttcaagtgtcgcatcgccaagtactagcacaatggccagtattggtgactcagactcgaaagattctaatgaaactgaaaaagttgtggattcagaaactagtccgatagctgtaactgccacaactaatacaattacgacgactaacgataaagtccagttaaatcgggcactattagcgcgagccgccatacccgcaactgttgtctcaactgggactctgggaacaagtgcctggcagtacacagatgatggtgtgttgacgattcatgctggtgattggaccggagtgggtgatgtcagcgacgtaccgggggattttggcagtgagttaacgaaagtagtgattgatggtccaattaatgcggggactgatactagttatatgttccggtataatccaaatttggccagtattgatggccttgaaaatctggatacttcgaaagtcactgacttttcaatgatgtttatgggaactaagattgctgacttttcaggattagcgcattggaatgtcagttctggtacgtcctttgactctatgttcgccagtgactcgcgagttcaatcttatgatttaagtcagtggcagttgaatacggttcaaccagtgagcttaaaaagaatgttttcatttaacacggccttgaccagtattgatctaagtacttggaatgtgcggatggtcacggatatagatgggttattcaatggagataagagtttaacaacggcggatttacatggctggaacttgttgaatgttacagcgttgtcatcgatgtttttaaatgataccaatctcactgatcttgatataacgggctggcagacgggcagtacgttaactagtactaagtttatgtttgagggaacccctggattaaaggcaatcaacattgcgagtttggacatgtctaactttgcagcagtcactgaagctgatatgaataaggaacctgcagatcatgatatgtttttgaatcaagatagtagcgggaatccgttgcccatgaacctaaacgcattaacggttgggtcaaaaacatatttagtcggtagttcattgccagacattccaactggaactggctataccggtaaatgggtcaatcaagctgatgccacccagacgtatacgtcgagtgagttaatggctttgtataatggcgtcgataatccagccgatacaatcacttgggtctgggaaactagcccatcctatgctgatttcacgtccaagaatgtaaccggattaattgccgggccgaagacgacgtggcgagttgccgatagtgttgcaacactaaaagatgtgaatgggactgatatttatgcgaccgctgacacagtcgtcaaagtaattagcgtgaacggcgatactgctgtaacgacggtcgacactcaaactgccggtacctatcaagttgacttgcagtatacggatgcgtatggcaaagtatggcagcaaactagtacggttgcggtagcggtaaatcaaggcaaactagttggtaaaccgttggcgatcaaaatgggtgctaagccaacgtatacgattaatgatttaatcgacacggacaactcccgcaatgcggccggcgataagctaagtgctgacgaactcgcgacggctacggttacaggcttggatacgagtaaagctggcgcacaaacggttacgctggcgtatacggatgatgctactggcatggtccacacgacaaccaccacggtgacgatggtcgcaactaaggccgacttaacaatgcgtaatagtactatcattaaaggacccaaaaactcaagttgggactaccgccagtatgtcacgagtgtcactgattttgatgggaacccggttagtttagatggacttaacattgtggttgatcagcaacctgatttaacgcaaattgggtcgcaaactgtcacactcacgtatacggatgcgttgggcaatgtcatcagcgtcccaactcaagtaacagtcgttgcttctcaggcacaagttacaaccaaggcgccgttaacgatttggcccagtgaggttgctcaattaaaagtcgccgatttggtgacaatcacggctgccaacgggaaccccgtcgatactagtaccaacctaacagatgtcacaatgagttcaattgacacgagcaagggtggcgcgcagaccgttactattacttatacggatgaagctggcaatctagtgacagcttatgccaaagtaacggttgaccaatcagatttgaagaccaagctaacgaatccaattgcggggcctaaagctaaatgggactatctagctggtttggaatgggtcaaggatgcaaatgaaaagttgcttgataatctcgcaaccgctgatattaaagtcgttactgaacctgatttaagtgttgcgatggtcggccatgaccaaacggtgacactcagttatacggatgagttgggcaaagaacacttagtcactgcggttgtcaacacggtggcttcgaaggcgaagattacggctgtcagcgaccagatcatcatacctgatgaagccaaaaagctgacggcaaccgacctggtcagcgagttaattgatgcggcgggaaacaaaatcacgaattttgatggtgtgacgatgagtggttttgatgctaaagctatcgggccacaaaccgtgacactgacgtattcggatgcgtatggtaaccaaacaactgattcgacgacagtcaccgtggattccgcaacgctaacgcttcagaatcacactcaagtggcaggacctaaggcgacttggaattatgctgataacatcaaagccatcactgattctaagggccagtcgctaacattaagcgatgccaagattacggtcgtgcaacgtccagatttaagtgtggctggaacttataaaattgtacttgaatatactgatgatttagggcaagcgcacacagagactgccgatgttgaagtgacggcttcaaaagcggccattactgccgtttctaagcaggtgattttggcagaaaaagcgaacatggtaactgcgtcgtcactagtgtcgacactgtacgatgcggatggcgttcaaatttataattttgatgatgtgacgatgagtggctttaatgctaaagctatcggaccacaaacagtaacgttagcgtatacggacgcgtatggcaatcaaacgactgtttcgacgactgtaaccgtggatttcgcaacgctaacgcttcaaaatcacactcaagtggcgggacctaaggcgacttggaactatgctgataacatcaaagccgtcactgattctaagggacaatcgctaacattaagcaatgctaagattacggtcgttcaacatccagatttaagtgtggctggtacgtatccaatcgtgattgaatataccgatgatttaggacaagtacacacaaagactgccaatgtcgaagccacggcttcaaaagcgtccattactgccgtttccaagcaagtaattttagcggaaaacgcgaacatggtaactgcgtcgtcgctagtgtcggcactgtacgatgtggatggcgttcaaattcataattttgatgatgtgacgatgagtggttttgatcctaaagctatcgggccgcaaaccgtgacactgacgtatacggatgcgtatggtaaccaaacgactgattcgacgacagtcaccgtggatttcgccacaatcactggtcaagcgacacacccaattgccggtccaaccgcgacttgggattaccgggacagcgtcactcaagtcatcgataccaacggaaagacaattgatgtcgatactgctgacattacagccacaacgcctgatttaactccggcaaaaactggcaagccacaaacggttacattgacctatactgacagtctgggtaaagttcacacgaccgacgtgattgtaacgacgacgctttcaaaggcgaagattacggctgttgctgaccagattatttggcctgatcaagctaaacaactgacggcaacggacttagttgatcgtttatacgatgctgaaggtcatctgattacaaattacgacaatgtcgaaatgagtgcgctggattccaagttagcggggcagcaacgtttgacgttgacttacacggatgttgcgggtaatcaatccgtcgcttatgccaatgtgacagtcgaccaggcaaagctagtgacaaaaccaagcacggtaattgctggcccgacggcaacgtggagttacgaagccggtattagtcagttgatgaatgcagctgggcaacttattaccgtccaaccggggacaattaaagtgttgaacaggccagatctgaatgttgattcagtcgggcaacaacagctgatcacactgatttatacggatgagctcgggaaatcccagtcggtcacggcaatggtgacagctgaggtctcacaagctacgttaacggccaaggcggcagttatcgtgcaaccggatgccgcggcgaagctaacggctaatgaccttgtaacgagcttaacggacgcctctggacaagcggtgactgattatcaaatcgttcagatgtctaagctagacgcgactcggccaggtgttcaacccgtctcattaacttatacggatgcggctggtaacgaagtaagtaccgttgtaaaagtaacggttgatcaggccaagatggagagtcagaaccggactcaaatctggggaccaagtatgacttgggattatcggcaacaattggcaactgttacggattcgcaagggcatcagttgaatcctgatcaagctaaaattacggtcataaccggcccgcaactgacggctaaaatgatcgataagccgcaaacggtcaccttgatgtacacggatgatctgcaacagacgcatactgtgtcagccattttgaccttaacggcatcacaggcggcactcgtgccacgtccggcacagattgtatgggccaaagatgcggggcaactgacgccagccaactttttgcaaacgattaccggcgcggatggcactcaagtgtcgtctttgactaatgtcaaaatgagtgcagtcaatgctagccagcctggtgcccaaacggtgactctaacgtataccgatgattacggaaacgaggtgacaacaactgcccaagtgacggttgatcaagccgccttaacgacccaaaccgctcgaccggttgccgggccgactgcccattgggattatcagacgaactttaaaaccgtgacgaatgctgccggcgaagtgattaatgtcggtgatgctaatattaaggtgttgacaggcccagatttgagcacaggcatggtggggcggcctcaagtcgttacgttcagttacactgatgaattaggattgacccaaaccaccacggcggaggtcacaacagtcgcctcacgggcgcacatgacgactagtgctgaccaggtgatttggcctgcagctgtcggaaaattaacggttgcggatctagtcactggtttaacggacgcctggggtcagactagtcagaattatcaaaatgttacgatgacgaccatcaatgctcaacaggccggaaaacaacaagtcaccctgacatatactgatgaggtgggcaacgtaaaaactgcgactacgacggtgacagtcgaccaagcagcattaacgactcagccacaaatggtcatcgcgggtccgactgccaagtgggattatcatcagggtattggaacgattactgatggtatgggccagccgattgcggtcaataatgccgctattacagtcgtggcgatgccagacttaacggttgcccatattggtcagccacaaactgtgcaactggtttacacggactcgctgggacaacaacaaacggcgttgatccaagtgataaccgttgccacgcaggctaaaatcagtacgcggccagttaccgtgattgccggccctaagacgacctggtcactgaatgatagtgttgactggtcaacgagtttggcagcggatggcacgttgctgacagcggcgcagcgccaacgggtgactgtagatggtaccctgaacttacggcgggccggcaattacccactgacactaagttacatggaccgtgcgggtaatctgattactgtcacgacgagtatcgatgtattggctagtcaggcccagttacaagtgcgtgatagtcagttgaccgtcggaaacacttgggctgctcaggataatttcgaacgtgcaaccgatgcccagggccaagcactgacattagccgatatcgcggtcgatggtacggtcaacacgcaacgcactggccggtacacattgacttaccactatattgatgttgccggtaatcagttaactaaaacggccgtggtgaccgtcgtcttacctgacgatgatcacattaacacgaccgaccctgataacaatgatcatggtggaacgaccgtacctgacaacaatgatcacggcgaaacatctaaccctgacggcaatgatcatgcaggtatcgctgatcctagtgaaacaccgaagccgagtgagcgacctaacgattcggatggtcataccgtcgactggggcgttgatgatcggattacgacaaagcaacaaccggccgcggctactcgtgcacagactaaggtcaagacgaccgctgagccagctctaccggccaacaatgagcatactagcgcagccaaagcagcagcgacacctgtgacacgagtaactgacacgactgctgacacactgccacagacgggcgagcgcgaccgctcagcacaacaaggcgcggtagtactcggattaacgggattattagggttaatgggattaggacgtcggcggcatacgcatgaggattaagcgtacgattggcgtgttaggttcatcgattagctaaaattgatagcgatttcttgcaacggacagattcattttgaattggtccgttttgttaactgctgctgtttggacttaatggctggttgcgcgggttgatgaatctagtgtcaagtattcagttaagcagtgattaatgcttgaacaaaattttaaaacataaaaagggggtactttcatcagaatctttgctagaaatggctatttactttattttattaagtaaacagctgatgatagtgacatcattaaagctaaattaaaaaagtataaaaaattgaattggtcgcgagacatgaattatgttatattttatgacataccgttccggtaaactatttgaggaggtctcgtcgatgagaaagtggcaagttgcagttgtcatgttgttagcagcgttgggaagctggtttgcgattggtacccaggcccaggctaagacgtatacgattgcgacggatacaacctttgcgccgttcgaatttcaggtcaagggtggtaagtataagggaattgatatcgatattttgaaggcaattgccaaaaaagaaaatttcaattataaattaaaagcgcttagttttggtgccgctgttcagcagcttagtgcgaaccaagttgatggggtaattgccggaatgaatattacggctgaacggaagcagacgtttgatttttcagacgcttactatacttccggggtggtcatggctgtggctaaagatagcaaggtcaaaacgtttaaagatttgaaaggtaagaccgtggcccttaaaacggggacagctggtgcaacctatgcgaagtcgattcagagcaagtacggcttcaaaatcaagtatttcaatgactctaataacatgtataacgatgttaaggtcggcaactcggctgcttgttttgaagactatcccgtgatgtcatacggaatcaagaatggcatcgcgttgaagattgtttccaagcaacacgaggccggcgactatggtttcgcggttaaaaaaggtaaaaacgcggaactgttaaagaaatttaacgcgggtctcaaagcgattaaagcggatggtacttacaaaaagatcattaacaagtacttgaagtctagtgaagcatccttaacgggtgaagacgcaagcagtcggacctttattggcttgttcacccaaaacttggatacgattggctcagggttatggatgaccttggaattaacggttatttcaattattttagcgacgatcctcggactgattcttggggtcttaggcgttatgccgggtaaacttggtccggccatctccagtacgattatttatattttccgtgggatgccattgatggtgttggccttctttatttacattgggttcccagacctgattgggcacggctttaagattcccgcgttcgttgctgggatgattacgttgatgcttaacgaaggggcctataccggagcctttgttaaggggggctttgccgcggtcgacgatggtcaaatggaggcggcccgttcacttgggttgccatactggacggccatgcgcaaggttattatgccccaaggaattcgaatcatgattccgtcgttcattaaccaatttattatcacgctgaaggatacgtcaattctatccgttattgggatcgttgaattaacccaaactgggacgttgattattgcccggaacttcgaaggctttaagatttggttaatgattgcgattatttatctgattatcattacgttattaacatggttatctaactgggttcaaaggaggattaactaagcatggcgaaagtaattgtcaaagatttgcataaaagctacggcgataacgaagtcttgaaagggttaaaccttgaagttcaagataacgaagtagtctgcatgattggaccatctggttctggtaagagtacgtttttacgctgcttaaatgacttggaagttccaacacaagggcaagttgtcattagcggttacgatctttctgacaaggggactaacattaatttggtccgtgaaaatattgggatggtgttccaacactttaacttatttccacacctatcagtgttacaaaatattaccttagcaccgactcaactcaaaaaggaaagtcaacaggaagctgagaaaacggcgcgtgacttacttgctacggtcggcttgtccgataaggcggatgccatgcctaagtccttgtctggtgggcaaaagcagcgggtggccatcgctcgagcgctagccatgcatccgaaaatcatgttgtttgatgaaccaacttcagcactggatcccgaaatggtcggggatgtgttggatgttatgaagaaattagccgcagatggtatgacgatgattgtggtcacgcacgaaatgggctttgccaaggaagtggccgaccgggtcgtctttatggcggatgggttgattcaagaaacggggaagcctgaggatgtattcgaacacccacaaagtcaccggttacaagatttcttacaaaaagtgatcaacgtttaagtatcggctggtcataataaaataacccgtcaaataggcgcgctaagaattggtttaattcttggcgcgcctattctgtagtaacgtgcttgcatagcagatgaagtggtgttgctctgaggacgattaactagtgaataccgtgatatgggcaacttgatcggcacgtcaactttgatagggtgttaagctggcaaactagttatgccaacttaactaaaaacaacggtcatcccgaaacaggggtggccgttgttttatggctagttctatttagtgttggggcaccttattacggggtgtcaatgtataattactttcaccaaagctaacattgagtccctttttcgcaactggtgtccgcgcgcggttggtcggcttttgccagtgatccaggatcgccgcaatgcaaatacacagtggttctgtggattgatcagtaattgctaattcaaatgcttcaccgttagtggtgacaactggtcgcatcgtcatgattaattcagtaccatgataaacgcggtagttttcggcactcaagcttcccatgataatccagcgaagcttgcgaacatagagcatttcatgccagaagcccagcgttttactaatagaaccgacgttttgacggttatagtataaatcgaattttggcaacaatccgagggttgtttgtcgaatttcggcaagtagcttaccttggatcgcgtataaactgagcgcgtcttggcgccgcccccaccgaccaactaagagatagtgagattggttgtgcgcatcgcgaacaatccgggcaccttgggcgaagctattgcggctgaaatataatttacgcatcttcaacctccgttttccggaaactattgtttggcaagcacttctaagattgctttgccgacaccatcgttgacatttgtatcagtgatatagcgggctaactgtttgacttcgggactggcattacccatagcgtaacttacgccagctaattcgagcatggagacgtcattattattatcaccaatcgccatgacatcgctcattggggtattcagcatattcgcatagcgctcgactgcaatccctttttgcgcattaatattattgatttcgatatttgatgcggatgaagatgtgattttgagggacgaatgttttgccagaatttcatcactaaggggttttagcttagcgggcccttcttcgctgaaagcgataatcttcatgacatgcttagtcggatcatccaataactcgttatagttgtccacgtaattgatgtccataagttctaagcgggctgacgcgagcgataccgcaattttgaacgttgtatctggattcaggttagttaggagatgtgcaatttgttcgattcgcttggctttactgttagagtaaataccatcgttgcctacgacttcaaaatagtaaccttgtgaggttagcgtgtgaaaaacggtgcgggccacgctattggttatgggcaccatgtcgagcattttgccagaagcgtcgtatacttcggcaccgtttaacgtaatcaagggtgccgtgatgccttgagcggccagtagtggctgagcttcagaaaatcggcggccggtggagacgataaagtgcacgccttgctgttgtgcttgacggatggcattagcgttaaaatcggaaacgaccatttcattgttgagtaacgttccgtccatatcagaggcgataatcgaaatcatgttgtcacatccttagttgttttaataattacattttaacatgtttacgtctgaatacagaattattatcattagtggttttggttatgatacaataaaacgagaggtgttaaggatgaaagcgtttattcacacggactggtgggacgtcttaaaaccagagtttgaggagccgtattaccaccaattacacgaatttttgaaaaatgaataccgaacgaaaaatattcacccagatatgtataatatttttcaggcctttgaatggacgccatttgctgacacgaaggtcgttattttaggtcaggatccgtatcatggccctggtcaggcacacggactgagtttttcagtgttaccgggcgtggcagtgcccccatcactagtcaatatctataaagaattgcaagatgatgttgggtgtacgcccgtcaaccacggttacttggaaagttgggccaagcagggagtcttgttattgaactccgtgctgactgttcaaaatggtgtggccttttcacacgctggtaagggctgggaacgacttacggacgttgccattcagcgtttatcggaacgatcgacgccggttgtctttatcttgtggggtaaggcggctcggtccaagattaagctgattgatacccagacgaatgtcgtgctacaagcacctcatccgagtccgctttcagcttatcgcggattctttgggtccaaaccattttcaaaaacgaacattgcgttaacatccttcggcgaacagccaatcaattggcagttaccagagcacgtcaatcttgagcattaattaatttattggagggttatcacatggatttatttgagtcattagcacaaaaaattactggtaaagatcaaacaattgttttccctgaaggaactgaaccccgaattgtcggtgcggcagcgcgattagctgcagacggcttggttaagccgattgttttaggtgcaacggacaaagttcaggctgtggctaacgatttgaatgcggatttaacaggcgttcaagtccttgatcctgcgacatacccggctgaagataagcaagcaatgcttgatgccctcgttgaacggcggaaaggtaagaatacgccagaacaagcggctaaaatgctggaagatgaaaactactttggcacgatgctcgtttatatgggcaaagcggatgggatggtttcaggtgcaatccatccaactggtgatacggtacggccagcgttacaaattattaagaccaagcccggttcacaccgaatctcgggtgcatttatcatgcaaaagggtgaggaacgctacgtctttgctgactgtgccatcaatattgatcccgatgccgatacgttagcggaaattgccactcagagtgcggctactgctaaggtcttcgatattgacccgaaagttgcgatgctcagcttctcaactaagggttcggctaagggtgaaatggtcactaaagtgcaagaagcaacggccaaggcgcaagctgctgaaccggaattggctatcgatggtgaacttcaatttgacgcggccttcgttgaaaaagttggtttgcaaaaggctcctggttccaaagtagctggtcatgccaatgtctttgtatttccagagcttcagtctggtaatattggctataagattgcgcaacgatttggtcattttgaagcggtgggtcctgtcttgcaaggcctgaacaagccggtctccgacttgtcacgtggatgcagtgaagaagacgtttataaggttgcgattattacagcagcccaaggattagcttaaacggtcacttagtttgttaaacgagggaaacttcagagcttgtactttgaagtttccttcgttttttctataataagaacagttaatttggatgaggagttggaagaatatggaatcaatcacggtaacgtcgccggaagcaaccatggcaatcggggccaaacttggccaattagtgcaacctggtgatttaatcttactagatggtgatttaggtgctggtaagacaacttttacaaaggggttagcaaaaagcctgggcattcctaataacgttaagagtccgacttttacgctcatccgggaatatcgtcagtggcgactaccgctctatcatatggatgtttaccgcttggaagatggcggtgcggaagatttaggcttagatgaatactttgatggtgatggcgttagtgttgtggaatggtcacagtttattgccgacctcttaccgacgacttacttgcgaattgcaattagccgggacactgatgccgatgaccagcgggtaataaccttcaagcccattggtgaacactatcaacgactggttgatcaattgaaggagtgacaaccatggcagaagaagttgttgatgtacggcctgctgaagtcgcggatgcagcacaattattagcgctactcgctcagctcggacgtgaaagtaatactttcactgttgatgagggcattgaggatttgagcgaaacggatgaacaggcgcaaattgagcgtatcaatggcacaacgaccaacattattttcgttgcgacattagattcacggttgattggtgtgagcaccgtgcaagctagtacggattttagtgcggcgcaaggtgaagttggcgtagcggtacttaaagaattttggggcatgggtctggggactgctttgattgaggaagtcttagattgggctcgtaactatagctcattggaacgcctcgtgttgacggtccagttacgaaatgtgcgtgccgttaagctgtaccagcatcttgggttcgaaaattgtacggcaacgagctatgatgtcgttgacccaaccggcaaacgggttccagctattgatatgggaatctgggtttgaaatccgggattcgctgaactgacggcaaacaggttctgatagtagatgggccggaatttaagcgttgacgaaccaggcctaaccggcgacggcttgtgaatgattggctcatctcccagtcggttgggggaattgataagctgtctacgagtattgataatcggtagtgatgcgtaaacaaaaaagtccagcatcttattgctggacttgcataaatttaattttaaccctgaacgcgaacgaaagggttgagttgctcagttccaaaagcttgcgcttcggtgagtaaaatgttggcgcaagctaggctgtcatctagtgcattatgatgatgctgcaggtcgatatccagtgcttgacagactgtatccagcttgtgattaggcaattctggatagaaccgttgactggtcttgacggtatccatggataggtactccggcgcgctgatgccgtagtgggcaagcgtattgcgtaacacaccaatatcaaaaggcgcgttgtgcgcaattacgaggcggtcgcgttggaagaatggtgcaatgtgttgccaaacgtctggaaacttgggcgcgtctgcgacatctgcttcatgaatcccatgaatttggacgttccgccagaaaaaatcgctctctggtttgatgagtgtgtaaaattcatcgctgatttggttattacggacaaccgttagcgccagtgaacaagcactgtcgcgtttcgcgttcgccgtttcaaagtccattgcgacaaagttcaaagttgccaccaccgtttctaaagaataggattatcgtacaaagaatctcgttaattttcaagttaatggttcggaaggataatatcgagttccactggacagtgatcagaaccaaaaatttcattatgaatgcgggcgtttaggagctgactgtctaattgctgtgacgtaataaagtagtcaattcgccaaccagaattgttgtcacgtgcatgcccacgataactccaccatgagtaaatgtcggtttggtcaggatagaaatgccggaatgtgtcggtatagcccgctgcaaggaggcggtcaaacttggtccgttcttcgtcagtgaagccggcactatggtgattgctacgccagttcttcaagtcgatgttttcgtgggccacgttaagatcaccacaaaagatcaacggcttgttggcactcaaactgttaatatatgtgagaaaagcatcttcccactgttgccgatagtcgagacgttttaattcaccgcctgaattaggagtgtaacacgtcaagacgtagtagtccgcatattcaagggtgatgacgcgaccttcgtcatcgaattctggtacaccgataccataagttacattgagcggctcgtgtttggtaaaaatcgccgtacccgaataacccttgcgctcggcatagttccaatattgataataacctgggaagtccagttcaatttggcccgcctgtaatttcgtttcttgtacacagaaaaagtcggcatcgagttcattaaaagttgtgacaaagccgtgtttgacagcagcacgcagtccattaacgttccaagagataagtttcacgtgagtttcagacctttcaagtaatttactcatattgtaacacggcagccactggttattttaatgacaattgaatcagtgcgccgtgattaaagccagacacggcggatagatgtgcgatagggtgacaaagcatgctggtgtctttggttggcctagtttcagcgcgtccgagcgggtatctttggctttcagtgatggcacgtttttccagctaacaatcactggcatgaattggacgctgaatgatttaaatcagtgtgccacggagcaatcagtagtagctaaaagaagattgatgataaaattggaggaatatcgatgttaaaaattggggtcattggtttaggtaacattgctcaaaaggcgtatttacccgtcatggcggcgatgcaagaccagtatgaatttcatctaacgacgcgtaatccggaaaaacgagcacaactagcgacgatgtatgggtttcaacacacccatgcgacccttgaggaattaatggcagttaaaccggcggccgtatttgtgcatactcccacggacacgcatgcagcaatcatcaagcagttgttattagctgggattcacgtttatgtcgataagccagtcgcgactgatcttcaggtggtccaaagtttgtatgatttggctgcggcgcggcacctgttattgacttgtgggtttaatcggcgttttgctccttttaatcagcaattgaaggcattgcctgacaaacggatgttagtggctgaaaaagttcgcgaagtgggtagtcaagatcctgaaacggcggttttcgacctgatgatccacatggtcgatacggggctattcttgttagatgaaccacttgaacacactagtggtcggttgacgacgacggcaactggcgcgttggcgcaaggctatttgacggtgcagacggctcatgagcaattagaagttatcacgaatatgtacggtggggtcaatctggaacaagtgacagtccaaacgacggggcaacgtgcgtctgtgactgatttaagtactaaaaccgtgatgacgacggcaacaactaccacgacggcttttccggattggacaccgacattggaaaagcgaggatttgcaccgctgatccgtgcttttctgacggcggtaacaacgcacggacctaatccagtcgacccaactggcgcaattaccagtcacgcggtgtgccgtcatttattaagtgattaaaaagtgctaaaattaactgataggcttacaaatttcaacctgattatatcgtttcaatagcgtttcaatgctgcggtgcttgatacgtcggcctaaattaaaaacgctatgcggttaaagtgattattaacgtaagtgaattaaatcgaaacacgaaaggaacttttcaccatgaccaaagatgtcttggccacttttccagccatcgaaattaaaaaaaatgaatcactaagtcattatacgaatactaaaacaggcggtcccgccgattacgttgcgtttccaaagtcaatcagcgagacgaaagctctgattacgtttgccaatgagcaaaatttaccactaaccgtgattggtaatgccagtaatttgattgtcaaagatggtggtatccgtggattaacgatcattctcacccgcatgaagcaaattcatgcgagtggcaccaaagttgttgctgaagctggtgccgcaattattgcgacgactaaggttgcttgtggcgctagcttgactggtctcgaattcgcagctgggattcccggtagtgtcgggggtgcgattttcatgaatgctggtgcgtacggcggcgaaatgagtgaagttgttgaaacggtgacggttttgacgccagcgggtcagcttaaaaccctggatcatgacgaattagattttggctatcggcacagtacgatccaggactatgatgatattgtcgtatcggtgacgtttggtctcaagccaggtaatcagaccaagattcaagcgcggatggacgaattgaatacgttgcgagcagccaaacaaccgttggaatggccatcatgcgggagtgtttttaagcgaccaactgggtattttactggtaaactgattcatgatgctggcttacagggccatcgaatcggtggtgctgaagtttctaagaaacacgcgggttttattatcaatgtcgatcacgctacagcgaccgattatatggatatgattcactacgtccagaaagttgtatttgaacggtttggcgtccatcttcagacggaagtccgaatcattggtgaagacgtcgttcaaggttagttatgtcaatttaacaaagggggcaaccactagatgccgattatcgaattagtgattttactggcatgtttagtgctgctgtcgaatgtattgagccactatctagtcgcaatcccggtcagtttaattcaagtcgggctgggtctaggagtggctttattattaaatgtacaggtaaaattgcaaacggattggtttatgctcgtctttattgcgcccatgctgtacaacgatggcagagaatttccaaaacaggaattatgggaactacgcggggcaatttttgcgaatgcaatcgtcctcgtctttattaccaccattctcggtggctttttgattcacgtattgatcccaacgattccgctcgctgttggaatcgcgttggcggccattttatcgccaactgatccgattgccgtgcagtcgatctcggaaggggtcaagttacctaaagaaattttgcacttggtcagtggcgaaagcctgattaatgatgcgagtgggttaattgggttcaaatatgcgttagcagcagcggttaccggtacgtttgtactcggtgaagctgttggggatttcttctatattagtctggtcggtttggccgttgggctggcgctgatcacgatcattcaactcattcgggacgtgttacgacgagagggtatcaacgatatcgtgttcaacgtggtgttacagattctcacgccgtttgcaatttatttcattgctgaagaatggttccacgcgtccggtgttgtcgccgttgttgcggccggggtattatcgcacttgcaaaattcacatgaaagtgaagatgcgccggaattacgattagtgacggaacgggtctggaacgtggttgtttacttattgaatgggatcgtcttcctgattcttggtattgaattgccggcagcaacgcaagcaaccattaaaggcgcgcatacaaatacgtttcatgcggtctttgacgttttaatcgtctgggggattttgttactgattcgggttgcttggacatacgcttacatgttgttcaactggttacgacatcacaagaaggctaaacctagtctcagaattgcagcattgtccggtttatcaggtgtgcggggggccattacgatggctggggtcttcacgattccaaccgtggtggcctcgggcaaagcctttccggaacgtgcgctcgtactgttcattgcggctggagtcatcattgtaagtttagttgctgcggcggctattttgccattgatggcggccaaatcactcccctttgttactcggggatccagtccggatgaagacgacgcggtcttggcagagggaacggatgacggtgatgatagcagtgggcaattgccacagttaacatacaagcaagcccgcatttatatcttacagttagcgattcaaaacattgaagaacatcggcggccagctaaccaacgtgcggcctatgatttgatcttggaccagcagtttcagattcggcgtctagaagtggcgtcgcagactgcggatgagttggcgccaatgctgacagatgaattggaacttcgcttagtggcactgaatggtgaacgggcagcagttagagaaatgattgccaataaacaaactagtaagttagctggacaggtctacttgcggcgtgtcgatcggcgcgaacaacgtttcttacaggcgacacatcgacaggggcttccgacactgcgctcattacggttgttgttgacgcgtgcaatgcaagggattcgactatggttagcacctggcgatagcgaagaattacgagtggcgttgttggatattcagcgtgaggcttctaaagctgctattaaagcgttgtcgcggtatctcaaacaggccaacgttgatgagcaacagtttgatcgccaggctctgtatcacttgatcgttcattaccggaatcgcatcgagaatgcgaaaaatgatcacacgttatcacgtgatgattatgaacaacagctgcatggactacgcatcaagagtcttggtgccgaacgtgcgggtgtacagcatttgttagagagtggacaaattagtttacgcaccgcggcaaagttacggcagttcattaattactcggagaacttattgatgctcaatgatattgaggccgatgaagattagttaactttttagattgtaaatcagtagttctaggttataatgatgttagagtagtattgacggtgaatggttaggtttgcaaattaatcattacttaagcggacgaataagggcagccttacagggggaaacatcattatgacagaatcagaaattcatgaacgcttcgtggacacttatatgcatattttaaaatatgtcggggacttcgtttcagtgccgacccggccgtataagataacgtttgaggcctacacggttatgcggatgattgcaacaagtgaggagccgctgacgttggtcaagattgcgaaagagcagcgggtttcacggagtgcgattgcacgtcaaatcaacgtgttattagatttgaagtacattgaacagaccacgaatacgcatgatcgccgaatcaagtacttatcgttaacacctgctggccataaagtggaacaggaaatcaccacggcttccgaggaacgttttcatcaatgggtccaagtctatggtgaaaaacgggcaagcgatacgttgcgttatatcaacgatgcggaacaaaaggctaccgaactgggtttcagtggcttcagtgggttgcatgataagcgggggcggcataccgaatatagtgatcctaagacgaagaattagctaatatttagttaataataagaaacaccgtttgaaccgattatcaaatcagttcaaacggtgtttttgattacgctaggacttatccggtgtttgataaggaaccgttggcatcgtgaatcgccaagccgcgtagatgaggagttgaagtagccacatcatcaagacaaaagcgagcatctttagtgaccacatttcaactaattgtttcacaatgtactgtggcgtaattagtaagtagatggagtgcagtcggaggaatcggccaacgtagacaccgacactagcaaataggaagagtgcggcacagatgataccacgactagcagggagtcgctggaagtgtaaacgttgggtcagttgctgggcaattcggtcaacgccccaggtaccaatgattgtagacaccatcattggcccaaccaagtaagcgaaatcccgccacatcggtaagtcgaagcgcaagagaccgttgatgccatacggcttcaataggctgaggtggaataaatcagtcattaagtacggtgcattcggatagaaaagcaaccaaatgaccgcaatcagccaaaataatagcgggctacgtcggggtgtcagccaaaaactcagctcgatcgggacataagccaaaattgaattaagtaatagaaaatggaacgcgccgtgcaagtcgactgctgcgaagatgaaaaatccccagaatgcgagtcgcacaaaccactgttgtaacctagtcattcagtcacttcccttctagtgttaattttaacagaaatattaatcaagctatattaaataacatcaagcttaatatttattcaaaatctagctaaaaagcgcagaccctgctgaaatcgcaccgcgagaaccgggttgccgtgctataatgtgaaagtaaatgattttcatgaggaggaggactatgactttcaattggagcggtttgttgaccttacaaaactttgtccggctccttgacattcttgcggtatggtttgtcatttatgagctgattgtgttgctgagaggcactaaagccgtacaactgtttcgcgggatcgttgtcattgcgattattaaagctgtgagtgttttgattggtctggacacggtttcgtggattatggaccaaattattaactgggcagtcattgcaatggttattatattccagcccgaaattcggcgagggctagagcatttagggcgtggttccatgtttgcacgtggtaagcgtcagaatgaagatgaagagcggatgattgccgaactagataaagccatccaatatatggccaaacgacgtattggggctttaatgtcaattaagctgggcacgggtctcgaggattatatcgagaccgggattgccttagatgctgatatcaccggcgaattattaattaatatctttattccaaatacgccgttacatgatggcgccgttatcattcaagataatcaaatcaaggttgcagcggcgtacttgccgttatctgaaagtaatctgattcccaaggagttaggaacccggcaccgtgccgcggtcggaatcagtgaagtaacggatgctctcaccattgtcatttcggaagaaaccggtgaagtgtcgattactaaggacaatgagctgatgcgggggatgacgcgtgaaaactacttgcggtatttccgccaagtcctattaacgcctgaggattcaaccaagcaaaacgcgcttcaaaattggtttggacgagttttcggaggaggtccccgaaaatgaaaaaatttatggatagcaattggtcaatgcggctactagcactgctgtgtgcgctggtgctcttcgcctacgttaattcgttaaagacaacgcataacgccagtattttgacgaatagttcatcgaaaacgacattgacatctaaccgtaaagtgaccattagcgcgcccttggagctgaacgtgaatagcacgaagtactttgtaacgggttatcccgaaaatattaaagttacgattgaagggccgtctgctttagtaacaactacagctaacacgcagaattttaaagtttatgctaatttatctaagttggcagttgggcggcacagtgtcaaagtcgaagtcgatggcttgaataaagaattgagttatggacttagtcaaaagtacattcatgttaatattcagccacgacgaacggctacttataaggtcagcgcagacttcaataaagccaacgtagcagatggttatgaagttggatcggcacggctcggaacatcatctgtcaaagttacgggcgccgtcagcgaagttagcaaagtcgcgaaagtcgttgcggtcgttaataccaacaagaatttagagaaatccgtgaaccagcaggctatcattgaagcattagatgccaacggtcaaaatttgaacgttgtcttgacgccttcgaccacgtcggtgtatattcccattacgcaggcgacaacgacgaaagatgtgccaatcgatttgaaagccagtggcaagaccgcggcggacaccagttattcattctcatctgacacgaagtcagtgacggttactggcacgaaggcggcattggcgaagttgaagtctttgccagtcaatgttgatgtgacgaatgttgattcaaccacgactaagacggtcgatgtttcgactagcgatgaggatgggatctcgtcagttagcccaacgtcggtcaaagtaaaaattacagttaaaaatgattaatcatgacacttttgaaatgaggtaaattataatgaaatattttggtactgatggtgttcggggaattgcaaattcaggcttaacacctgaaatggcttttcgtttaggtcgtgctggtggctacgtattgacggaacatgcggaaaacaagagtacgcaaccacgcgttttagttgcacgcgatacccggatttcgggccaaatgctggaagaagccttgattgccggcttgctttcagccggaattgaagttttacgtctcggtgtaattacgacgccaggagtggcctacttagtacggatccaagatgctgacgcgggtgtcatgatctcggcttctcacaatccagttgaagataacgggatcaagttcttcggtggcgacggcttcaagttgtctgatgccaaggaagaagaaatcgaagaattactggatcaaccgaaagacactttaccacggccagcagcagaaggtctggggacagttgctgattttccagagggtaatcttaaatattcacaattcttggaacaaacgattccagatgacttaagtggcattcatttggctgtcgatggtgccaatggttctacaagtaacttagtttcccggatctttgcggatttgaacgtggaatttgatacgatggctacggcaccagatggcttgaacatcaacaaaggggtcggttcaacacatcccgaagcattatctaaattcgtcgttgaaaaaggcgctcaagttggtttagcctttgatggggacggtgatcgttgtatcgcagtcgatgaacttggaaacattattgacggtgacaagattatgtacatctgtggaaaattcctcagtgaacgaggcaagttgaagcaagatacggtcgtcacaacggtcatgagtaacctgggcttatacaaggccttagaagcagctggtttgcacagcaagcagacccaagttggtgaccgctacgttgtcgaagagatgttgaaggacggctataaccttggtggtgaacaatctggtcacgtggtcttcttagactttaatacgacgggtgatggcatgttgactggaattcagttattgcacgtcatgaaggaaacgggtaagaagctttctgaattagccgccgaggtgacgacttacccacaaaagttagtgaatgttaaggttcaagacaagaaagccgctttgaacaatgataagatcaaggcagttatcaaggacgttgaagatgaaatggccggtgatggtcgcgtcttggtacggccttctggaacccaagatttattgcgggtcatggcagaagcgaagaccgacgaactggttagcgcttatgtagatcggatcgtcgatgtggtcaaagctgaagttggcgttgaataattaagtgatcagaccgatcatcaaaaaagtcgttactcctagagtcgcgactttttttgttgccatgaaacgaacggttattgctaaatgcggttaactggcgactgtcaggggacccagtgcctcccaaaccaatttgaccgcaaaaaagttacaaaaaattcgaaaattcgtgatgcccttgatttatcagcgtttgagattggtatacacgctaactaacacgtataccaatataatatattgttgacttttattagatgtaacggtaaagttaacttgtttctaggagatataccaattggaggttagactagaccaattgttaattggttaaagcggaatagcgccaggactttagaatctaaagttgacgaggatgacgtttatcgataatcgacgggtgacgtcagggactgcactctacaggtcaattacaaaaaccgactgtgaggttggtgacagatatattgaccacgcagctagaaacaattcaaacagtaaaggaagattaatttatgtgtggaattgttggtgtaacgggtaaagatagtgcagtatcaatcttattgaacggattggaaaagttggaataccggggctatgattcagctggtatctatgtcaatgatcaagatggtcatgactatttagttaaggaaaagggtcggatcgatgacttacgtaaagaagtaggtgaagctgttcatggttcgaccgggattgggcatactcgctgggcgactcacggtgaaccgagtgttgccaatgcgcatcctcaagtttctgcggatggccgcttctacttagttcacaatggtgtaatcgaaaactttgaagacttaaaacagacttatttaagtgacgtgacttttaagtctcaaacagatacggaagtcattgttcaattagtcgatcggtttgtcaccaaggaaggcttgagtacgttggccgctttccgtaagacgttaggtctgctcggccattcttcatatggattcttactgatggataaggaagatcctgacaccttatacgtcgcaaagaataagagtccattattaattggggtcggcgaaggctttaacgtggtctgctcagatagtttagcgatgttagaccaaacgaaagatttcttggaattacatgatggcgaaatcgtggtcgttaaacctgatgaaattaaaatcacgaaccaggccggtgaaccagttgaacggaagccattccatgtcgacattgacgcagctcaagctgacaagggaacttatccattctacatgttaaaagaaatcgatgaacaaccgaatgtgatgcggaagctatcccaagtttatcttaatgatgcgggtgatccaatcatcaatgatgacttgttaacagctcttaaagcagccgatcgactatacattgtggctgctgggactagttatcatgctggtctggttggtgcaaagttatttgaatcgttggctaacgtgccaactgaagtgcacgtttcgtcagaatttgcatacaaccaaccattattatcagcacatccattcttcatcttcttgacccagtctggtgaaactgctgatagtcgtgaagtgttattgaatgtgaacgatcaacatttcccaagcttgaccatcacgaacgtgccaaactcaacgttatcacgcgaagcaacgtacacgttgttattgcatgccggcccagaaattgcggttgcttcaaccaaagcctataccgcacagattgccttacaagccatcttggctaaagcgttaggtgtggccgttgaccaaccagctgcaacagctttcgacgtgaaacagcagttggcgttagtcgctaatgggatgcaaagcttagttgatgaaaaggctacttttgaaaagattgctaagagtgccttattgaatacgccaaacgcattttatattggtcggggactggattacgccgtctcattagaaacggccttgaaactcaaggaaatctcttacgttcaagctgaaggtttcgcatctggtgaattaaagcacggtacgattgctttgattgaaaaggataccccagtgattgggattattacgcaaaagaataccgctgggttgacccgctccaacttacaagaagttgctgcacggggagctaagacagttactatcgtcaccgatagtttagctaaagatggtgacacggttatcttgccaacggttgatgaacgattaacggctttgcttagtgttgttcctggtcagttattggcctactacacgagcttaaacaagggcttagatgtggacaaaccacggaaccttgccaagagtgtgaccgttgaataatttaaagtaagtgtgtgggcaccaagaaacgtcaccgttcgattacggtggcgttttttgattgcccacaaagcttttgcataatttttaactactaatattcataagactattgtgaaagttgacaatcttttggtatgataaagtaagcggttgcgataacacaactaaataattagactattggggatgaatggtcatgctgaaatataaatattttgcacagccaattaataaccttggaaccaaccgaacaatcttgtatgagttattattacgacagtgggatgagaggcaacaaacttggcgaataccagcgacctttgaaatagcgccaacagaattgattcaattgctggattgcgctattcaggaattaaataaccatcatgtttccatcaatttaacggcgcgtcagtttgctaatcctgactttcaagctgcaattagtcactatgtgcagacgcatttgttaccacgagaactaactgttgagctagttgcgacacctgagctaagtgagttacagcaattaagtgttgggtaccgggcagctggtatattacttgcttttgatgatgttggttctgataacctattccaacagatcaaaatgatgttgccatatgtgaatacggttaaattcgcgttacaaaatatgcgaccgctggggaccccaactacggatgcaattgtttcgacgctcaaattttggtttgataaggcggaggaacagcaaatgctatttacctttgaaggcattgaatcagcggctgatgttcaactggctaatcatctaggcattacgcgagggcaaggatattattttgccaaaccgcaactacccgcgacatttatggcatgacaataatggtatgctacaatagtattcgtagcaatgtaactgagtgccatgttgatgtttaatcggctgaatcacatgacgagacgaggccgattttgttagtaaatgataaaagatggggtggctacttgtggcaatcaatttaattgcaactgacttgaatggaacattattgcatcaagatcagcgttttgacaaagaacggtttaaacgggttttggcgcagttacgggcgataaatgtttccctagtactttcgtccggtaaccaatatgcccatcttagacagttatttaaagatgttatggcggataatcttatcgttgttgctgaaaatggggcgtcgatttatgcccaggaccgcttgatctttgatggtagtctttcagcagaccagcaacgaaagtttgtgactgttgatcgttaccagccactattcaaagacgcatacgtaatcttagttggtagccatgggtcgtatactgagttaggagcacctgataagttagtagcgatggcccgtcagttttatgatcatttacacttggttgcggatctggccactgttgatgataccgttaaaaaaatcagtatctcaacgtcaccggaccaggctgctgatctggtggcacgagctaatgattattttgatggcgagttacgtgcgcatgatagtgggtatggcgtcgtagatttggttgatcagcgggtcggaaaattaccagcaattcaattcttggcgactaaacttgggttaactgcagctaatgtgatggccttcggtgatggggcgaatgatgtcccattattgcgatatgcagcgcacagttatgcgatgtgcaacgcaccggcggacattcaagccgcagcaaaacacttgacggtcctggataatgaacatgatggggtattagcaaccattgaacaagagttgttaaataattaaaagcctataactagtcagtaaaaagctgagctatcgaatgaacatcgttattcgatagctcagctttttgggtcctattaaagtgattgattagggtagaagaattgatgaatgccataagtgttgagcgaaactaaacgctgctttagttcagccaaagatagtcctaaatcaccattaaaatagagccggaaaaaggttaaattgttgtggatcaaaaagcttgaacagaccttagcatcgattgcagataaatgatagtttgtttgaatcgtcgttgtaagccctgctaccacggcagcgtggattttccgagacaaaaaactgtaatcatcattcaacaaaatgactcggtgaaaagcttcagattggcgaaaataggtcactaagcgatcaaagattaagccgggttggctaatatttttcttgaaatcttgcgggtcaatgagtgctagaatcttatcagcaccttcttgaacgaacgtttccgctaaatcgtcaatggaatcgaaatgtaaatagaaagttttgcggttgatattagcgacacttgtgagctccttaacagtaatatcacgatagcgcggatactttaaagcaagcgtccgaaaagcctctttcagcgcagtctgggtgcgctgaacacgtaagtcagtagctggcataatctgatcctccttattaattacatttgatggggtggtcattattaaaccgccgctaaatgtactagtcgttaagccacatgtgggtattattatcataatagcacttattttgatagttaactcgtcctgagtcatgacagattaactcgcgcaacgtgcataatagcatatgcgcctagtaggtaaatggtaatgaagccatgtccgtcgactaaaatgggttaggagattttcgttcagtcaatggtatggtgtaacgcattattagtgagtcaaaaaagctcccagtagtttgcattctgggagatcaatttgaatcattcttgagtggttagacgtcgtaaatattagaaaaacgataggccgtttggtaggttacaggaatattaggttcgataatgatactgccaaattccttgtggtgaatagcatccggtaatttttgtgcttgcagggaaagaccaagttgagaacgcatcggtttaccgccattgagtcgataacgatcatcacggtaattagttgcactggaaaccacgactgccggagcgttcgttcgcatcgtgactttgcgtccactgatgcgatctagtaattctacttgtggatatggggtgtcgtttaagacgaagccgtgatggagcccgcccttgatgttagcaatctggggcccaacctcgactgggtcacgaaaatcaaatggggtgtcggtgacccatggcaacttaccagttggaataccgtgtttgtttaacgcggcgtactcgtctgcattgattttaagaacatggtggtcaatgaggcgttccgcatccccacttagattgaagtaggtatggttgctggggttgaataaggttgttttatcacttttaccagtgtagctaatagtaaatttaccgtcgttatctaatacgaaattagccgtgatcgtcattgtcccgggatagccgttctcaccgtccaaggtaatatattgcatgacgagtccaacttgatcactagtgtgcagtttacgttctaaaaaccatggttcaaatgaaatttgaggcatattaccaccgtttagatgattttcgcccgcattttgagttaagtcatactgccgccaccgggcatttttgatgatccccgcaacccgagcgatggttgcaccgaaaaaagattgataggtgatgtagtcggcgccgtcgtcaaatcccaagacaatatttgcaaaattaccatctttatcatgggttttgatcgcggtgactgtggcgccccagtccataatagtgacgctcatatgatgattgttcactaatgtataataattaatcccgttcccctgatgctcgattattttcataatgccctcacacccatagctgcctgacatgttaccgcctacttttagtatatttcattcttaaagggaatgcgaataataacccagcaagtgttaatgcgagagtgacagggttagttgctagtgaggtcaatttaaataaccagtgtaaataattataattgattgttgataataattaaaattatctaggttgagaagtttattttaaatcttggtaattgtgaatggtaccaatctattaaataaggtgaattaattaactttgtgcaagtaaagacggcaatttagtggcgaacatggctggctgagggtgttagaaaaagattaatgagtaaatagaaataatttatctatttattttggctaactgttgacaacgcttacaatatcgcttattcttagtttgtaaggtatttaattaccttctaatcaattctctttctctcttatgccgaccactatctgcttggatagtggtttttttgagtgaaattagcgaatttatggcggaatagatgaagataaggctctcttgtaatttttgaagattgatgtttactcagaaaaaggagtgctcggctgatggtagcattttggggctgactgagttagtttagtgttcatcaagtacaggtgattaggcataccaagcctgatcacctggcaattactggtcagttttgacacgactgccaaccccgcttatactaaaatgtgaagtgagggattgcagttgaaaaaccatgaagtattagacttaattcaagaaataacacgtaatgatgggacctcatacatggagatcggaaacatgttgatgaatggccgcgctgagttagcagctgaacgtggttttattaagcaagtgcggatattacaactaaacattccgcattccacgcatgttgccaagtatgagcaatatattaatgaaacatttacgattcccgatgaaacgatggatcattgggaagaatggacaaaaacacctgacatgcaagctgaggtcgatctgattttgaaagaaaatcatattggctaaaagctgttagccaaagtctagcgcaggagtgtgagtttatcaaacggcggttgttttttagtaggcgttggctcaaaagttgaactttcagaatgtcaattctctaagctcagcttttttgtttggatcatgtaattgactgattgtggtgatttaattgcgggtgcgtggtgggggaaaataacttacaaacgctagtatcagtgttattatcaataagcatgtttaaggaggctcgttattaaatgaagaatggggcattgctacaatttattcaaagtcatttccagacccgttttcgttttcgtaacgcgtttgagacccaattgactgttcagattttaagtcgattaattggcgaacatccggaaagtttgttattgactcggcgagatgttgaagcgttggcaggctgctcattggacgcgccggcactacagcgagaatattttccgcagcgtgcgatgacactgttagaaacggcgttagatgagctggttacgttaagtgttatcatacaccaggatcagggcaggacccgttatcccttatttcggagcgtacagcttgatcaagtgtgtcaacgaattgtgtttaacttgaacctggacgtgttgccacaattaacggactggtcacgggaattacaacaagaacaggagcgattttaagtgacaaagagtgtgattgaaaccttacaggaccatcgaacgcggcgacaatttaccactgaaccaattagtgatgcgcaattcgcgcaaatcatcacaacggcacaacaaatgccgactagccaatatttacaggcatacagtttgattgagatcactcagcctgcactacggcaacaattggccacgattacgacgatgccaacggttggtgaaaacggccgtttattagttgtggttgcggaccaacaccgcaacgtcaagctagcaccgggcgcaacgacgcgtcgggcactgagtgaatttgaccgctttgctggtagtattgaagatgccacgctgattacagcggcgatggggatggtcgctgaaagcatgggtcttggtagcgttgtacttggatcaattaacaacgacacgcaggcggtgattgacgcactgcacttgccggacttgacgttacccgtctttgggttgcagttagggcacccagcggatgttcctgaaaagaaacctcgattagggttgcccgctgtgttgtttcaagatacctatgctgagcctgcgagttatcaggcggagttggaccggtttgatggcgttttgaatcagtattatcaacatcggagtagtcacgcccgtacggaacacttagcgcacatgacgcaggaagcgacccactcagcggccaaacggcgagagtttttgacaatcgctaggcagcagggctttttgccggaattagaccaataatcgttaccataacactaataattagaatggctgagcgaaaaataaccgttaatgtaacgctcccatgtcgctattagctgacatgggagattttttggtacctgggaggacgaatcttaacattaaaataagattaaatattgttatttttactaattataatataattaattctgagacgatgtttactaagcaggcccgggctgcgttgcagattcgagtgaaagctgagtcgatccttattctgatgtgtgatagtaacattgttgcaaggcttgaaaggggcggataatgtgatcaatgccaacttcagaaaactcgtcttagggcgagcagtgggtaacgctggtgacagcatctacatgattgccatgaactggttcattctccaattgaccaacagtgcgttgtggatcggcatcatgaatgtggctattgttttaccgggcgtgttgttgtttctgtttggtgacagtatcgaccgacattctaaacgccgattattagtcgcggttgaattttcacagttagtgatcgtggtcatgctaattggattagttgcgttacatattaagttgccaggtatctatgtcgggctggtattcgtcgcggccctttttggatcactagcttatccgattcaagatacattagtaccgctgctcgttgagccagaccagctagttcaagcacaagcggacatgtcaattgcctacaagggaacggattacgtgttcaacgcgctgtcaggatttttgatcagcctctgctcagtgctcggtgttttaatcatggatgcagccacgtttgtcgttaccgttgccacttttaggcggatcaaactcgctgaaccccgtcagcaacacacgcgggaaaagtccttgtatctcaaccagattttggttggtttcaaaattatcagcactgatccgctgctgcgtttattgacgtttgcgagcgtcgtcatgaatttcttctttggcggtttgaatacgtacgtcgttttatttgggcggcatttcggtggctcgatctactacggtattttggagtcgatgtcagccgttggaatattattagggatgacggtagtctaccgacagttaaaaaagttgaccgttcggcagtcttacctcatcggcaactttgggcgcgcgttattcatgatcttgacagtagtgtcgtacaaccagttctggctgtttgccatcatttacttactgagctttgtctttcaaggactgacgcaagtatttgagacaccgatgattcaagcgacggtcggttcagaccaactcgggaaggtaatgacctgcttttatacgctggtttccgtgaccttaccgctgggttcgctagcgttttctttcctagctgaccgctttgatttacggctattcttattactatttgccctcttttatgccggcatattcctgctatttctagccagtcacgcctttaaaaaagtagacgaactacaattatcataaaccccacgcgatattcattaatctgtcatcaatcatgattaaaacgtgccgattaggtggatttctgttcgtcagcaatgatcgtcctattccgacctccggggctgggtgacaattgctggaacgtaagccgacatcgatttgagctaacgcccaactcgcgccatctcaaatacgagtcttattctaagccggaaggaaatcacttccgactaagaataatttggctactgagcattgtcacccagcccctccagtctcaagagtgtgcggggccacgagttgaagccgagcattgcctagccaacggattaatgcggttttggcattagtccgttggcgtagcaagcacaggctttagtggcaccgaacacgtttcgggaagccgctcgaatggctgatgaacgaccacttaactcggcacaattggtcgttgactattttgatacaggaactttaaacgagacgttagggttaccctaaccactttgttgaaacgttcgattactactatggtgattccaaaatagtaagctatcacaatgtcattttctgcctgacagttgctcgacaaaattactgtttatgaagaacaatgatgagtccaataaaagttgggtacatctccgtctgccattcgaacactgtcccgactggaaggcgtttctgacaatgcccagtggtgaaatttcacttagcaagcgtcttgtgcttggttagtgaaaggccagtatttaagacgtgggcttcggcttaaatctgttcccaccacgttccggcaattgacagaaatgcctggaagtcggcataggacacactaactaagcaagtttacgctaacctgaactttttccagcgggtctaagctggttgcttttgaacttaaaaacttggcacgttttaatcatgaaaagcaacaaacacagtgcggattatcggatagatgagaatggcagtgatggactcaaggaaaatagtgctgaactaaaaacgtcgtgactgacttcagtcgcgacgtttttgattagaaatttagtttagttggtacttgattgggcgtcgattgggatgtgcttgaatagttgggctgctttgacggcggcttgccagccttggtaaaggttcgcacgttggggcgcggccattcggggttggaagacattgccggtttggtggattgatttgagttcgtccaaatcttgccagtatcccacggctaggccggctaagaatgcagcaccgagtgcggtcgtttcgaggtcagcggcccggatgatcttgacgtttgagatgtcggcttgaaattgcatcagccagttgttgcgggctgccccgccgtcgaccatgagtgtgggcatggtgatgttggcatcgtttttcatcgtatcaatgacgtcgcgggactggtaggccagtgactgtagcgtggctttaacaaaatcagcccgggtggtcccgcgggttaagccaaagacggctccacgggtctcggaatcccagtaaggtgcgcccaatccggtaaaggcgggaactacgtaaacttcgttgtgattatgggactgttgagcaagactttcggattctggtgctgattcgatcagttgcatgccatcgcgtaaccattgcagggccgaacccgctacgaagatggagccttcaagcgcgtaattgatgttgccatcaagcccgtaagcgatggtcgttaaaaggttgtggtcggataattgcggttgctcgcccagattcatgacggtaaaggcaccggttccataagtatttttgaccatgccaggttcaaaggccatctgaccaaatagtgcggcttgttggtcgccggccatcccgctgattggaatttggctaccataaagcaagtagtccttagtcgtgccatagatctcagagttggaccgtacttctgggagcatcgcagcaggaatgttcagtaggttcagaatcgtttggtcccattgtaagtcgtgaatgttgaataacatggtgcgactggcgttggtgtagtcggtgacgtgggtctcgccaccagtcaatttccagacgagccaagtatcaatagtcccgaaaagaagttcgccgcgttccgcgcgcttttgggcaccatcaacgtggtctaagatccagcgaattttcgttgctgagaagtaggcgtcggtcactaggccggtgtgccggtgaatcagatcgcccatacaatcagcgatgagttgctcagctaacggtgcagtttgccgggactgccaaacaatggcgttataaatgggtagaccggtttgcttgtcccagacaacggtagtctcacgttgattggtgatcccgatggcttcgatttgattaggtttaatattagcgtcaattaagacgttagcgatcgttgaggaaactgcgttccagatttcagtagcgtcgtgttcgacccaccccggttgcggaaagtattgtggaaactccttttgggcgtcggcaactttttgaccggcgtgattaaaaataatggtgcgggtactcgtggtcccctcgtcaatggccatgatatatttggctgacataacttgttcctccgaagattgtaatcaataacatcatctttgatgctagcatggatgagtggatttgtgaataaatatcaaaaacttaatatataaactggcgtcccacgaagtatctagaattaatcatcacacccataccaatccgctggaatgaagaaagggttaccatgcttgttttgataatattacttttgtacaacggttagtaacggtgttgaactaagattaatgaatatttgaaatgtagaccaatcagcatataatggggactcaaatcggtgtgaaatggaggattcctagtatgcaaaaacgacgcttttttcttaaaggctctgctgccgaggttgcttggctcaatcggcaggcggcgcggggctatcaattgacggcgattcacggtctgagttatcagtttaaagaagtctcacaagcacgtcagttgattgccgaatacatgccacagccgacgttacaagctatgacgacggtcttccaaccacttactagttatacgtttcatgatgatatgacggtggtttattcaactgtggcccctaaacaacgagtggtcaacaatgatcaacaataccgcttagcagtgtatcgacatgctcgcgatgtcgccttgaactggctcaatggctgggtgttggtagtctggctcatgatgagtgcgacgattgtgattagctcgcaattacaagcaacgccactattaacccggttgttattacttgggttggcacttggtgctggggtgatggtggcaggtattatcgttggtgttcggacagcgattcgttgtcaccgggaagtgtgtcgcttgatccgtatcacaggagacgatcacgagacgtggaagccgacttttcacgtgttgtttaagcatcaacaggccgctcccgatacgacttgctgggatgatttaggcaactggcaactggcactgcataatcagcgtggggattactactatgagttaaaaacaacattgagtgaattagaaatcactaatacactggcacaacgcttttcaaaacaggacttttccgtggtatcgtggttaggtttgtacgttgtttgaggcggatatcatattaattatgtgaatttagtgtgactttttttaaaaaggacttgttttttatcataaaagcgtgtataaatacagacataatcattgcccggtagttcagcggtagaataattgactgttaatcaagaggtcgctggttcgatcccagcccgggcagttggtcatgtttagttaagtagcggtatctcgtgaggtaccgcttttgtcggcacaagtacagaatagcgctggcatttgatgggtaattggctggcagaactttagaaataattaactaaaaaagttctgacaaaccttgactattcttgactaaaaccgtatacttactatattaaagtaagtggtgtaaagtcacttgctgaaacttaggaggaattcatcgtgacagtaaacttatattattcaacgtccagcaagtctagtcgtagtgcacgagcatggttagttgagaataacattccatttaatgaacgcgacattattgctaatcctctggatcgcgatgaattgaaacaaatcctccggctcactgaaaatggcttcgaggacatcgtttcaacgcgttctaaggctttcaaagcattacacattgatttgtcggacttaggcttcaatcagctattggacctattagttgaaaaaccacaattactcaagcggccaatcatttatgatggtcggcggttacaaatcggttataacgaagaggacattcgggcatttttgccacgttcggtacgtaagtctgaattacgtgaaattcaacaaaaactttatgacgatgatcaacaagcagttggttaatcggatttagcgtttgagacgaaagcggcccatcaagaattgtgttgatattcttgatggggcgtttttttgtcggacgaatttacaattgaagtgcaacaagtaagaaaataaaaatagactcctagcctgagtcctgtagaatgaagtcaccataacaatcatctaaaggagctcttaggctatgagtccatatacacatcttaccttaaaagaccgcgaatgcatactgttaggtgtcactttacaccatacttaccaggttattgccgatcaaatcggttgttccaaagccactgtgtcacgagaaattaaacgcaacggcggtcggggtgcctattctgccgtaaaagcccagcagaactatcaacagcgccgattaaagagtcgtcgcctcagggtactggagaatttaaagctacgcgactttgtccttcactgcattcttcaacggcaatggtcacccgagcaaatcgccggtcgtttatctttagagaacagtaattggcatatcagctacaacacgatttatcgcggaattgaacgaaataatttaggcgttaaacgtaaaagtcatggggctcgaggattcgctcgaaagttacgacatcgtgggaaaactcgtaaggttaaaggaactgtcaacgaacgacgtggccgttttaataatgtcccatcagtccatgaacgaccagtctcatgtgagaatcggactcgttttggccattgggaaggcgataccgttcgcggcaagatcgggcgttcgggtttagtgtcactggtcgaccgtaagtcacgataccttctgtctgagcgtgtacccaaagtgaatgccaagaatgtgacccaagcgatgatcgacctcctgcatacagtcacacctaaacgcgttcgtacgcttacaccagaccgaggtacagagtttgcgggttatcgtgaagtcggtaaagagcttggtatctcagtctattttccagacccgcacgcaccacaacaacgtgggaccaacgaaaataccaatggtcttatccgagagtattttcccaaaggaactgaccttgatgaactgaccgatcaaggtatcgcgaagtttgtcagggatttaaataatcgaccccgtaaggtcttaggctggaagacaccgtctgaagttttcttcggtaaaaagttacacttgatttgacaattcgtccgaaagaacaataccagccagccaccagggcgcgttaggttgcgtgtcttcttaacagcgtatcgcgttgtagggcgttattttacttgccgattaccgcccgttacctttgctgagtaagcagattccttggtataatcagttggtttgtgtacaatgtaaaaaggcttaaaggaaacggagattttaacataatgagtgaacaagaccaggctgcctgggcgatccaggcactcgccgctttgaagacggctgataatcaagttgttgtggagagtatcattaaggtcatcgatgaccaacaggctgagattgagagtctacggggttcaatggaaggccaattatggagtccaactagctggcatcaagatcagcaagcgcaacgtgccgcgcatgaggacaagtccacaactaaccattaaaattgagaagacgccacaaaagacggttgttagactattattggtctaacaaccgtctttttgtcactgcgtttgtgaatttaagttgagcgccatgctgtgatttacggcgcagtcgagcattaagctgccagcaagggggtgcaagcttcaggatacagttgtgatcagtaatccgtgacgcttgtcttgcggtgctgggccacaaattggaaggtagctgccacgagtccgccaatcaggatacccgttgcgttggcaatgacgtcgttgatatcgctactgcgattgatcagccaatgttgtgacatgaaatattgcagactttcaatgctggcacccactaacaagcccgttaatccgaggcccaatagtgggtagtgatgaaagtggcgtttaattccccagcctaagggaatcgtcagaatgatattttcgataaagcccagcccgtgaagatacaaccgtgataggttcacttggccgacaccagctggcatcacgtagatggcagttccgtcgaatgacagcggggtaaacaaaatcacactaaggccaaataagtaacctaagccgagtagctgccgcgtccgggcttgtggctggcgaacgtgggcaagaatcaccaaacaacttagtgttgcaactattaaaataattctgaacggttcccaacgcatgcacaccactcctcggtttggattaactgtatcttaccgtaaactcagtggtcagaagtaaagaagacgtgaagcttaatgaagcctttaacggcttaaccaaatcccaagtaaatcagtggttagatgaccgtgattgatgttggtcgtcagccatattcgcaattggtttcgtagtcagcgctaaagcagctacaatcataatgataattagactgaaccagagtgcgatctgggtgccgagggtggtttgcatcgtactcgaagcactcggtgccatgcgggtgcccaatgtaatcaagacggccataatggcggtaccgagcgaaccagaatactgttgtagggtgttgaaaagcgcgttgccatcgcccattagttggggcggcaattgttgtaaaccatacgtcagggcattgttaaataagcaactgaacccaatttgaaagccaacaaataagccaacaaataagccaatgatcaagccgaccgagagatgctgggctaaccctgcgagacttagtgttgccaacagtaaaaagccactaccaatttggaatggtcgccgaatgccgcgacggtccatcaatttaccagccaaaggtgatagtattgctgaacataagcttcctgctaataacattaagcccgacactaacgcatttttacccaaagcgagttgtgcaaaattagggagcagaaaggtcagtccaatctgaatgaattgaatgaagaagtaaatgagaagcgctcgggtaaagttaccctgttggaagacggccaggttgattagtgggtgcgtggttcgggttgccgaacgggtaaaagtcagtacggcgagtaccgctaataacagtggtaaccagacgaatactaagcttaagccatgtgtactaaggttattgacgctaaaaatcagcaggatgagtgccgcgacgactagcccgaattggcataaggggaacggacgtgaccgtggtgcctgcgtttggcgaatagttttggccgttatcagccaagcaatcagaccaaacggtagggtaatgccgaaaattaagcgccaggataatagttgtgtcactaagccgccatatgttggtccgagtgaaggggccaatgcgatcaacattccagcggtccccgtaaaacgaccctgagcagtgaaaggaacctgggtcatgatttgcgcaaatactaatggtaatgccaatccagttccgatggcttgaatgattcgaccgaatagtagtaaccagagctgtggcgcgactgtacataataaaccgccaagaacgaaaccagccccgccaacgttaataattgtccgccaacggaagcgttgttgaataaacgccgtaataaccatggtagcggctacggcgagtaaataggcagtggtgacccattgaaccgttgctagagtggtgtggaattggtgcatcaaggtcggaaaggtaacgttcattgatgtttcaactaaaataccgcaaaaagccagactggcggtgccaaaaattgcaaccttcgtttgggttgggatgacaggtgttgttgtagacaaaataaaacctccattgatcaaggccagctcgtttcgtatgtgaaacgacgcttttcttgaccaacggagattccgttgtaaagatatacaagcatcaaagacgaccttgatgaatttattaatgatttaatcctagcatactactgataaaaatgtcagtccgctttttttattcgctgactttagcgctttgttcagctaaagcagtcaggtgctcgaataggatgccttcacgcagtccattttgagagaaaatcatccggtcagaatctaaaaagcgcatcagactaatggcaggaatcatcccaccaacaataatatcagcccggtcctttgctaatccaggaatagccgcgcgaccagctgcatcctggctaatgacagtattgaatgtgtcatagatggcgttgtcacgtagccgataaccgtgaatatcttcaaagttgaggatattgcatttgcgccggttaattttggctaacgttcggttgctaccacccaaacagacgagtggtaagttgagaccgtttcgcaaccaccagacgctattaaaaattttatcaacgaaagtcatcgttttaaataattgactagcggtaacttggtcgttgaggccgaacttttcggataaactgaccgcgccgattggcagactgattaggtccttggcttggccgtttacgataaggacgagttcgcagctaccgccaccagtatcgaccatgacgcagttagtcgttggaagcgtattgactacccctaagtaatcgtaataggcctcggttgttccaggaatcacttcgatatctaggccaacatcatttttaacgcgtttgagaaatttcttttggttgctggcctttcgcgttgcggcggtcgccacggccttgatagttaagttaggtaagtctttgtagacggcagcaaacgactttagcgctgcaatcgtgcggtcaatggcctcggcttgaagggtcggcgtatccgtggcgttttcattctcggataaacgcaccatttccttgagtcggtgagtgactgcataactaccgtcttcctgaatctgtgtaattgtcattcgacatgaattggaacctaagtcaatgaccgcaaagttttccatcgctaatcatcctctctatcaagatctgaagcatccggctcattcttgggactcatcattggaatgaactggtgcgcgttgctagtgggcgtagtatcgccgtgatcagccttgactgcttgctcggcttcgcgaatgaattcggcctgggagtccaaaacctctaagccgcgcccatccacacgggcgtacgtattatctggttgcaaaatgcgcgttttgaccgtgtcagcccacatcgtttcaaaaattgtcatcgcacggtgactgatttcaggttggagcagtgggaacaataattcgacccggcgatttaggttacgggtcatcatatccgcactggataagtaaatttgtggttcaccgtcgttgctaaagtagtatatacgactgtgctccagaaggcgaccaatgatcgagtggacctcgatgttatccgagatgcctttgatgcctgttcgtaaacaacaaattccccgaatgatcagttggatcttaacaccggcgtgagaagcttcgtagagtttgctaataatctgcggatcggataatgagttcatcttcattttgacaactgcgggctgaccagctttggcaatggcaatctcatcgtctagcttttcgttgataaagtcgcggatgccatctggtgagatgtgcaatttgtggaaatacggtggttcagaatagccagataacatgttaaagatgttggaagcatcgattcccatgtctgtatcagcggtgaagagccccatgtccgtgtagaaatgggcggtgacatcgttataattcccagttcccatgtgcatgtagcgcttgataccttcattttctcgccgaacaacgagggcaagcttacagtgtgtcttaagcccgatcaggccgtagatcacgtgacaacccatttcttcaagttttttcgcccagtgaacgttattttcttcatcaaaacgggccttaacttcaacgagaacggttacttgtttgccgttttgggcagcctgcccgagatacttgataatcggtgaatcagctgatacgcgatacagcgtcatcttaatggctaacacgtcctcatcttccgcagcttcatggataaagtccacaacgggtttgaaatcatcgtacggatattgcattaaaatgtcgtgatccttgataagatcaaagatggatcgttcgcggtacttcgcgggatagtaggcgtggtattttggataattcaagtcttcgtggccctgcacagcttttaccagcttggataagaaggtcaagttgaggggaccgttgatgacgtataacgcactttcgttaatcccaagggctttagcgagtcgcgtgcgttgatgcttgctcatactcttttcgacttctaagcgcatgaccttaccgcgttcacgcatctttaattgtttttgaacttcctttaataagtccgaggtatcctcttcggtgacatctaagtccaaatcccgcatgacgcggtaacagctcgtttccttgaccgtgtagttgataaatagtgagccgacaaaggctttgataatttcctcaatcagaataaactggttcggtgtgcctggcaaaacgaccacgcgaggaaagacgtccggcacttgaacggtggcaaacttgcggtctttcttatccccatttttataaatccgtaaggcgatgttgagtgtattattcccaatgaacgggaatgggcgtgaagagtcgtctgccatcggtgttaaagccgggtacagctcatcgtcaaagtagttcttaacaaaggcgtgttgttcctcgtttagatcagccatcgacaagagatgaatcgcgtgctgttccagcaatggcaaaagcgagcggtttaatgtattgtattgacgcttgaccatctcgtgggctttatcactgattgcactgacttgatcagcagcggtcagtcccgcgggatccggtttagtgtaattgactgacatcaatttacgtaatgatgcgacccggaccgtgaagaattcgtcaagattactctgtgtgatcccgagaaaacggacacgttctagcaaggggttatccttatcacgtgcttcatcaaggacacgatagttaaaatcaagccagctgagttcgcggtttgtataataactttctttataataattcatttaacgtaccccccgtagtttaatcactggtgttaaaccaaagacttctttaaagaattccgctttttgtgcgaatacccaattttctaagaagaggtcatcatgagcaaagcaagtaatgatgacccgtggattgcgaattgaaacggaaattttatcaattttttgtttgcgaccgtcatccaaagcgtccgcaattctcaagatggcggatagtttggagactaataagcgttgttcgacttgtaagtgtccaaaatggcgaatgtcttttgatggtgtttgcgcgctatggtagcgtgaaatcagggcgaccattcgtttttcggtatcggttaatcccatgagttcagtggcctgcaagatatagtccgaatgtaagtaatgttggtgcgggtcaatgtagctcccaacgtcgtgcacgatggcggcgacttgtaagagtaagcgctcgcgtttgcctaagtggtgtagcggtttaagctggtcgaacaggtgcagtgagaatttggtgaccaagtcgcgatgcttaggttcaacgttgtacctgtccgcaatgttcttagctgctgttacgatttgatcattaaagttatatttcttatagcccaacttaatggcttcttgaataattaacccatccagcacggtcacgttgccaagccagattttctcagcattagtgagttgtagtaactcgttaataagtagtaattcgggcacgattagccgcacgtcttcttcatcaacttcgtatttatccattaaatactggtcagaagcgttcaacacgtcctcatataaagcttgaaaatctgctttgctgagttcctccacgccagcttttgattgttgttggcgaaagagggtggcaaacggcgcgacgccgagcatgacgacgttactaggctgatctcttcgcccaggcaagaggcgaccaaagtcaacgatttgactcgaaatataatcatccaaaacttcaacatagttaggcacgctcgattgcaaatcttcaagaacttccgcgattcgaactggtcctaaacggaggctacgggagaagacaaagttactctgatcgtagtgcgaaataccgacactaccagagttgattcctaataagtaggtcggcttcgtgatcatttgcttgaatcgtggaaagtgtaccgcaactgcgactgaacgcaggtaggtttcctgactactagataaccagtcgatcttgagcccagtccggacaagtaattggtcttgaatatagtcggcattgttagcggatgacaaggaccacgacccccataaatggtagtccttaacgccgtaatcattcatgatctgaacaaaaccactcagtgcctgcgcggcttgttccactgaatcataatcgatcgtatgctgatcataaatatcctcaccaagtgaaacgtcggaacgaactcgttctacttggcgtaatgtgcgtaaattgacaatcgacaattcaatactctgaacgttaatcatcataattccaaataattttgctgccatggcgatcccccatttttatgatttcctgacccccaataaggttaaagtcatgtatttaatttaagtttaacacaggttggggttagttaaattagtattttagtagtgaaacagttagcgattacttttagtttttatacgaaagttaagcgtaattaaggccatcattaactttgtatgaatcttactagttaggtggttgatgtggtgcttaccccggtttcagcggtagcgaacgctaacctaacttggcacgtttgatccaagataccaaaaaggcgtggttcagccgtaacgagtatgcctgaaccacgctagttgatattataagatttcgtgattatcgataattagtttgttcagatgtttttcaactcgtttatcagctggtggcagctgcatgtaatcaccatacatccgggtcaaaatggtgtcatacgcactgggaatcttaacttggatatcttcgaatggaacggtcgttagctcggtcaattcctgataggtcataatttccttttcgtaatcgtattgagacgccagatttttgtaagttcgggagtctgactgctcgtataggcgcatgtattcctcacgttccagcttatagcgattgacttcagctaattgctgaggtgtgtgtttcgtaatcaagttgcgcagtggtgttttgacaaagcggtaattcaatttgagcaggatcgcagcgtctgctaatttgtaatgtaacatctgtgaacgacgtaaggcttcgtcatctggaatcttatcaaacggaaagatgtcaacgaacacgcctttaaacgcattattgacgttgttgcgttcttcaatgtaagtatttacgtctaatagcttcatataactgagtgcatagtccggatctgaggcaccggtttgtaggaaaaacttgtttggatcaagatagtggttggcgacggcgataaagcgctggtagtcatgacggcgcattccaatgtcgatgtcatcgtcccacggaataaatccgtgatgacgaatagcaccgagtaaagaaccaccgatcaaaaagtaatcgatattttcagcctcacagattgcgatgacggtacgcatcaagcgcaattcaacttggtgtaagggtgtcaggggcatggtctcgtctcctttttacgtaagcgtttcaactactttcatcatacactttgttgcacaaaattgttagggaggatgcttaacgttggaatttacgggtaatttcatgcaaaacagttaaaggcgtgttatatttggtcaaaagttaatgaagtgatggtgatcgcgatgaacagtgacgaattaagcaaacttctcaatgattattttgaagcatatcaaaatacaaccaaaattatgatggacttagtggcttggcctttaagtcaaaataaactgtcatttgaacaatttttaatattgcggcgcattgccacgactgatgaagtgacactcaatgatattgcaattcagcgacaagtaacgcgaagcgcgatttcacggcaagtcaaatcattgttaatgcaacactatgtttttcaggtgccagatccgcgtgatcggcggcggctctacttacatttaacagaacggggacaacaagtcgaacggattgtcgaccaagccattacccagcactttgatcactgggtcaaccagttgggcgcaccacagattgatcaagtgctcaagatgatggggacctttagccagcaggtcacggacctcggtgagccacagtcacaccccgttctacactaggatgtacatgggactaactactaaattagtattgatgagcaactattttggtcgctagtcaaaaacagacttcttaggaattgtcacaattcttaagaagtctgttttgttacgaatacccattgaataaaaacacttgtactaaagtagggtcgtttcatagaaagtaagcactcaaatgggcgtacttgcttcactgtgatacgtgtagcgctcaatgcttgaagaagttatggtaaaccccttcgcaagcttcaagaaacatcccaatagccattaagtacatggctaacatgttctgcattgtgaagaccaagtagagtaggacagtgtagaggattaaaaagaagattgccgtaattttggaaccagccatttaaatcacacctttgtatggagaatcgtgacgcgttatttgcctgagggtcgtgaggaccaagagcggttttaaggcaatgaacacgctttatcaatttcattctaccgcaggctcattaaaattgaaaatcgcaattaaacagattcaaaattatttagcgttcggttattgcttttaaataaacaaaatgatacgattaaatacgttaaaagaacgctaaaacacgaacgtttacaattgtgcaattataatttagacgaatatttggagggaatcatgaataaaattgcggcatattttaatttttcagaattgaaaacgtcaatgcgaaccgaagtgctggctggcttgaccacgtttgtttcgatggcatacatcctatttgttaatccgagcgtcctcggggcttcggggatggataagggcgccgtcttcaccgcgacggccttagcgtcagcgttaggctgtttattgatggggttagttgctaagtacccgatagcaattgcaccaggattaggcgttaacgcgttctttacttattccgtagttatcggaatgggcattaaatggcaaactgctctggctggggtgttcgttgcagccgtgatttttatcttgattacgatttttaagctccgggaaatgattattgatgcgattccgcgggatatgaagttagcaatttcggcggggatcgggttcttcattgcttttattggtcttcatggtggtggcttaattgttgccaacaaatcaacggttgttggtctgggatcattgacagttggaacgacctggttaactatttttggattgatcgtcacgttgattttgatgagtcgcaaagttcccggtgggatttttatcgggatggttttaacctctattttagggctagcaactggcttgattaagatgccatccacaattgtttcggcagcaccttcgttgaaaccaacgtttggtgtggcgcttggtcatattggtgatattaattcgttacaattgattattgttgttttgacgttcttattagtgacattcttcgatacggccggaacgctagttggattggcagaacaggctggattcatgaaaaataataaaatgccgcgggttggtaaagcgttgatggccgattcaacttcgatgttagttgggtcagtgttgggaacctcaccaacctcagcttatgttgaatcttcggccggaattgcggtcggtggtcgctctgggatgagtgcggttgttactggtgcgctattcattcttggattatttttctcaccgttattaaacgtcgtgacggatcaagttactgcacctgcactgattattgtgggtgtgttgatggcagaatctttaaaacagatcagttgggaacggtttgaaattgccgtacccgcatttctaactgttatcgggatgccgttgacttatagtatttctgatgggattgccttaggcttcattgcatacgtcattacgatggtcgcaactaagcatgccaaggaagttcatccattaatgtacgtgctgttcttcatcttcattatcttcttgtggatattaaatgtctgacagttaaaggtggtcagctcgacgttattggctagttacagataatttaaatgacttaattctaaacggactactgacgcacatgacgttggtagtcttttttgacgtgaaataggctaaaacttgatgagcgtcaagttggtttgctctggaggtgactatactagagtcattcaagtgatagaagggggaggcgaaataatcagaaagttaggataaacattgaaatgtaagcgtcatcatcaagatctatttcgaaactagctcgtgagcagtcaattggccgagatttgctaagcggggcaagcgtgacgagtggggatgtacccgtaccaattcgatttaataagacaaatacacaattagtacggtggttaaggtggtataccggtgtcgaaaataatacaaaatataaaaatacaaaaaaatacgtttttttttaaaaaattaaaaacgctccaaagcccgtcgttaacgcttgtaaaccatagaaagtttcgcaaaatttctaatgatagataaaatctattgataaaagcgtttacattttaaaaaatcgtgattacaataaagtcgtaaagttgataattaaaatatatcagaggaggacattactaatggctaaaattagtggttcagatgccgtattaaaagtaattcagaagtggggcgtaaaacatatttatggtttgcccggtgggtcgttcgattcaacgatgaacgccatctataatcaacgggaaacgttgaagtacatccaagtacgtcacgaagaagctggtgcgattgccgcttccgctgattataagctaactggaaagatcggcgtctgctttggttccgctggccctggtgctgtccacttactgaacggattgtacgatgctaaggaagatggtattccaatgttagcaatcgttgcacaagttcctactaagcggatgaacatggacttcttccaagcaatgaatgaagaaccgatttttgacgatgtggctgtttggaatcggactgcgatgactgctgagagtttaccgatgatgactgatgaagccattcgtcaagcgtatgcccacaatggtgtagctgtcttaacgatccctaaggactttggttgggctgaaattgaagacaactttgaaacgaacgctagcgtgcacactgttaactatcctgcaccaaccgctgaatcagttgctgatgcggttaaattaatcaaagctgctaagtcaccaatgatttactttggcgttggcgctaaggacgcggctgaagaattaaaagctgcttctgaaaagtttaagatgccacttgtctcttcagtattagcgaaggggatcattgaagacgattatcccgcttacttaggttccacgggacgagtcgcacctaagccgggtgccgagattggctttagtacggatctaatcctctgggtcggtaacaatgtcccatttagtatcttcttatttaataagaaggctaaggtcattcaaatcgatattgatagtgaaaaatttggtaagcgccaccatacaaacgttgctattcaggcggatgcgaagaaagccttagcggcgattaatgcagctggtgaagcgcgcgatgattcagccttttatgacgctgcggttgctgataaaaagaactgggacaaatggcaagccagcttcaacgatagcactgaatcaccagttcgccccgaaccaatctttgatgtcttgaaccaagaagctagtgacaaagctgtttgggccatcgatgtcggcaatgttaatattaactttgaacgcttgatccggatgcacgataaccagaaatgggcaacttctgggatttatgcaacaatgggctttggggttcctgccgcgctggctgctaaagtcaactacccagatcgggacgtctacagtttgagtggtgacggcgctttcgcaatgctgtcagaagaaatcttggcacaagttaagtataacttgcacatcatcaacattgtcttcagtaatgagaccttaggctttattgaagctgaacagactgatgatagccatcaaccactctctggtgtcgatttgccagatactgattgggccaaggttggcgaaggctatggtgccgttggttataccgttcggaccaaggctgaattcaagcaagcccttgaagacgctaagaagacggataagccagttgtcattgatgtgaagttaacgcatgcaatgccatttacaacggaacatatgtatctcgatgacgcatggcaagataaagacaagattgctgaatttgtcaagaagtatgatgctcaagcgttgaagccgttcagctacttcttaaaacaagctcaaacaaactaatttggatagataattaacgaaagaggacgcgattatcgcggctcttttggtacatagtattaagtgtcgcttgccattgtggcggtgacaacataccaagctgtagagaacactacgtgaacgttcgggaggtcgcacagatgcaagtaatcaatttagatgcccatcgattaaagatgctggcaccacaaccgccactggtattagctttaggtttctttgatggtgtgcatcagggccaccaacgcgtgattcaaacagcgaaacgaattgcgaagcagcgtgatttaccactcgctgtgatgacgttcaatcgacacgcgtcacaactgtttaagtcccagaccacttttcggtatctgaataccgtcgcgcaaaaaagccaacatatggcggcgctacaggtggaccgactatatattacggattttaaccaccaatttgctggcttgacaccgactgcgtttattaaggattaccttgtcgggttgaatgcgcaagtcgttgtggcggggtttgactatacgttcgggcagggtggcgcaaatgggatgcgcgaactcgcggaattgggcgccccgtactttgaaacggtcacggtggatcgcttggctaatcagcagcttaaagtcagttctactcggatccgggggctgattgctcgggggcagattgaacaagctaatgatttattggggtacacttacgcgacacaggcgacattcgatccgttgactagaacgatccaacttgcaaatcggcaacagcagttaccagcggccggtgattatcgttgttggttagttagcgctaattatcgacaggcagtcattctgcgagtcaccacgacattaaaaattatttcgccataccagttgccaccggaaaccacggtattagatgtggatgttcagtggcagcagcgtgctttgcaagtggtcagttctgtctcagcccagcatcaacaatcacaatatagtaaagcttaatgtagaccaccctgatctgtttgatggggtggtttttgattgtcgtcacgtcggtaagttgttcgtgctagatcgttagcgatatttgataaaactgagtatcgggtgtgtgcttgatcctatttttctagtccatagatagtttcacatgaaataatcggataaacacaaaattggcgctgaatggtgccccgttttgtgtacttgtaatttcacttacgaaaagtaagcatattaattgcatttataattgaaagcgatttataatacgtttgttaaatgaattgaaccaagcagacaaattggttctaagtcgaagggatgaatagtgatgacaaagatgattgcaggacaagctttagttaaggttttagaggcgtggggtgtggaccacatctacgggattcccggcggttcaatcaatcataccgttgaaggtttgtaccttgaaaaggccgatattgattatattcaagtacggcatgaagaagtgggggccttagcagcctcggcagatgccaagtttacaggcaaaatcggtgtttcatttggttctgcgggtcctggtgcaacgcacttattcaacggtttgtatgatgccaagatggatcacgttcctgtattagcacttgtcggacaggtgccacaagcgacgatgaacacgaattacttccaagaaatggatgagactccaatgtttagtgacgtggcggtgtataaccgcactgtcacgacggccggacaattaccatatgtcattaaccaagcgattcgtgaagcataccggcaaaagggaccggcagtcgttatcattcctgaaaatctctcagcggaagaaatcgattatcagccggtatcgacgcctaacaccgtttcagatacgtttgaacaacgggtcgatcctcaggccattacggcaacgttaaagatgctaaaagcagctaagcatccattagtttacgctggtcggggtcttcttggtgctaaggcagacctggtcaagtttagtgaacaatttaatatcccagtcatgaacaccgtcccagcgacgggggttattccaacgaaccacccgaatgcaattggtacgtttggccggttgggttccaaatcggggttcgaagcactccaacacgctgatttgattttgttccttggatctgaatttccatttgctagtttttggcctaaggggattaagattattcaggtcaacaataacagttttgatatcggcaagatggtcccaatcgattacgccgtcatcagtgacgcccaagcttatttgcaagcgatgattgcaactggcgaaacgttacctgaaacagcgtggttaacgactaaccggcaaaataaacgtaattgggataagtggctccaacaattggctgctgacgaccatgatggactagcgccggaagcggtcatgcacaaagttgctagtatggtcggccctcgtgatacctacggggtcgacaccggtaacgtctccgaatgggctgtccgggggctcccaatggatcaggagcaacgctttgccttatctggcctcttcgcaaccatgggatttggactacctgctgggatggctggtgccttaagtgttccagacagccaagcgtggagtttctcaggcgatggtggctttgcgatggtagcgccagatattatcacggaagcacgttacggcttgcctgttattaacgtgattttcagtaatcaacggtttggtttcatctatcgtgagcaagttgatacgaagcaacacttgtatggtgttgatctaacggatgccgactgggccaaagttgcagatggccttggtgggattggttttactgttcaaaataatcaagaggtcgaaaccgtctttgaccaaatcaaggcgctccaagcgaagggcaacaagcggccaatcgttgtgaacgcggtcatcaagaatgatgatccaattggcacagcttacatgccactagatcctgaattatatggtcaagcagaagttgacgcttatgccaaagccaaccacattgatattaaggaacagccatcattaggcgccttactacgagcacagggtgatcagctatagttaaagcctgaagggctagttagaccactgggcaaagattcagttaacctaatattattaaaaagccgccagtatcgggtatgacctgatactggcggcttattagttgttcagttaggatttatttttgattaaagctgccatcttccacgtcacgaatgaattgtttcaaatggtcaaagtagacgggggcgttgtcgatcatgtggtgatgaccaccatttggcgtcgttactaagcgtgagttaggaatatcacgagccatgcggcgggccgaagctaatggcattgtttcgtgttcaccgaaagttaacagggtcggcactttaatgttgtgaatctgatcgcgaatatcccattcctttaacttcccagtgataacgaattcattatcaccttgaaaggcgttgtatacaggagtggcagtggtgttgatcaaatggcgaattgaagtgggttgtttgcggtcaacatagccagcgttcagaacgtccacgtacttctgatactggggatcattccagttgccttccgcttccttttgcttcatataagcaacagcgtcagccggtagggcttcttcacgacacttgttaacgttgacaacgtattcctcaatgttatcgaccatacttgaaataatggcgccttttaagtgttgaccatacttgagcgcgtacatcattgtgagggcgccgccccaagactgaccaatcaagtagaagttatcgagtcctagtttttgtcggacttcttcaacttcatctaagaagtagtcgtaggtgagatatttcttagcaatttcaggatctgagtagtcgggttgatccgaataccaggatcctaattggtcgtacattgaaacttggacgcctaaatctgccagttcctcaccaaagttttcccagtattcgtgattgtcaccagggccaccgtgtagacataataattgaatgtcgcctttgccctgagtattcgtccataaatggtagccattatccagcgtgatgattgtcgttccttgtttcaaatgatcacctaatttcttcatattttaattgttatcttaccactgttaactaagcagggtcaaagagactaggcaatcataaagaattgcattaagtagataattggtaaggtcgtgttcgctaattaactgaatcagtacgttaacgtcatagtagctgagtatgggaggggacttcggtcgaaacgatataaaaataataattagaacgggccgtttagtctgaatttggtttatactagttattatgctggtcggtacgactgatagaccaagtttcagtcgtattgtgaccgattgtacacaattgatttgacaagcggttacatttttagcgataataagtaaactgctcagcacagaaagatgtaatattacattctttaaattcaattgcggttagttaaccaatatgaaataatgggttaactaattagagatgggtgagattgatatggcaaatcaagtcgcagttttacgcttgttaatccaagcggcgcccgcgtactgttcgggtgactggttggcacaacgacttgcaatcagtcgaacggctatttggaaattagtgcaaggattgcaagcggcgggccatactattgagagccggcatgggcgaggttatcggtatgtggccaataataaattgagtgcgccggtgattgaatacgcgcttacagcgttaccaccgtttgatttgaccgtgctaccaacggttgattcaacgaatgcctatttacggcggttagtcatgcagacgcctttagcacttccgaaaatcgtggttgcggatacgcaaactgctggttacggtcggtcggggcgggcattttattcgccagcacagactggaatttacatgagcattgggttaccactcagtgaccagaaggcgttagacgctggtttgttgacaacgagtactgcggtagtcgttgcccagacgctgcaacagctgtttgcggttgacgtttcattaaagtgggtcaatgatgtgttagtcaatcatcacaaggtggttggtatcttatcagaaggcatcactagtcttgaaacggggcaaatttcagcagtcattattggaattggcattaacttaacaacgacagcttttccagcgctactagcgcacaaagcgggcgcagtcgttgccaatccaaatggtgtgacgcgcaatcaagtgatttgtgagctactgcggcgctttttcaatagctatgggacttatcgtagtgggactttcatggacgcttatcggaaactctccatggtgatcgatcaacaggtcgagttgaagagcggaacgcaaaagtatcgtggagtcgtcacggatattgatgcacacggggcgttagtcgtcaaattagagactggtcagagtcgtcattttagttctggtgagattactaaggtgaacctcttgtccggtggttatcatggctagcaagtttgtaaaatcaatttatcaagttaccgaacgaatcgcgtcaatcttttaaaatgatttctgattcaatgttttactggttcatactgttgtatagtagaagttagtcacaagtagtgctaatcaatttcaatttgattaattgagctgtttggtacgtcgaatcaaccttaaattgttgataacataggaatgataacggatggattaatagactcacgtttgatttatttatattgtaattaagttcggggttatatgtgtttaatcagcataatgaataaagtggttaataaaaataattaatgaagtttaaataatgctggtcaatgcggtcatttacatattatagtaaaggtaccgaagcactggtgggttagttaatatttgtagagacaattcaaggggtaataggaatatgaatgaaaatttgcggagcgtaaatatgagccgaacaatgagtcggatgaatcgacaccggatgaatccaagacgttatatcaccggatttgatggtatccggacattggcggtgctgggtgtcatcatctatcacttgatgccggcctcactacaaggaggttacttgggagttccgatcttcttcgtcgtttcaggttatttgattacggatattttattacaagatattttgagtcgggggcatgtccggatatggcggtttctcggacaccggatgcggcggctatatccagcattcgtgacgatgttgttagggacaacagcctacattacgctgtttcaacggtcattattgacgaacattcgggctaccgtattaacgaatttagtctacgtctataattggtttgaaatcaatcacggtcaaagttattttgaccgtttcaatggtgaatcaccgttcactcatttgtggtcgctctcaattgaaggacaatattacttattctggccattagtgattggtatcttgatggtcatcttcaagaagcgttcacgggtcttctggtttatgatgattgctgcgggtatttcagcgataaccatggcaatgttgtatgatccagcgaatacgaatcgggtgtactacggaactgatacgcggatgtttgcaatcttgttaggttctggccttgcgtttatctggccatcacgggaattatcggcggacattgctaatgttaatcgagtgacactggatatcttaggcggtgcttcgctaattgcaattatttggatgtttttccagatgtccggtcaatctgatttcacttatcgtggcggtatgttactattcacagtcctatcaacagtgttagttgcaacggtggcccacccggctagtcatctcaatcgcgtcttgacgaatccgttgtttaagtacgttgggcaacgtagttatgggatctatctctaccagttcccagtgatgattttctacgaaactaaagttaaaaacattggtgatcatttactcctcaatagtttgattgaagttgccttaattttgatcgtgacggaattgagttatcggtttattgaaaatccaatgcggcactatgattacagtcggttattggtcgacttcaaagatttcctccgcaaaccgaagtttaaccgcgtgaccactgcgattgtcgctttgaccacggtcttattcgttattacggcggttggtttcgttcaacagccaagtaaagcggaagctaacaagaagactgaattacaaaagacgattgcagctaactctaaagcggctgataagaagaatgcggcggcgctcaaacggcaaaaagctgcccaggcagcggctgcttcaagcaagaaggttgcgactgaaaagatgcagaccaagcaggctgaagcgaagttgaactcgaagcagaagcaggtggaaaaggaatacgatttgaagccacaagttgttctagcgatggccaatacggatctgacagccattggggattcggtgttactggatgtttcttccgatcttcaagatgttatcccgggtacggtggttcaaggtcgcgttggtcgtcaagtgacggaagttcctggaatcattaattcgctgaagtcgcaagggcaattagcccataacgtcctattgaacattgggactaacgggacaattacggatgatcaagctgaacaagtcgttaagctgattggtaaggatcgtcagattttctgggtaacggcccacgtcccaacacagagttggcaaaatcaggtcaatgctcaaattgccaagactgctaagaagcatgcgaacgtgcatgttatcgattggcatggtcgtgcgcagaatcaaagtggttggtttgcagatgacaatgttcatccaagtacgactggtaatcgccagttaacgaatttgattgcgaaccgcattgccgaagttaataacaattaaagatgagttccagcttacgttgatggtaagctggaactttttttggctagttccggacgggtgggggtgtccgacctggtcatgataagtggctatttaagttgaaggtacacaaaaggcccaccagttaacggttgtgtggttagctggtaggccataattagttagtccgttatttttttcattgggacgtgtaagcgaatatcgttcaagttaagtgagtactgtaggtcttgattgccgcgaatcgtcatcttcatatcagttgcgtaaatgactagtccgagttgatgccccttcagtaagtggtggaacagcggttggagatccacagaaaagtcataaaagacatttggctgaatcgcttctgcgtgccatgggtggtgacggttctgcaagttaagatgccccttagtaatcatcttgaacggcgtctcacccgctaacttgaagtccttcaaatcatcttcgcgccagtggtaacctagatcaagcgcttttgcagctagcatttgtgggctgacagtcaaacggcgcgcggccccgaagtcaatcagcataaagctcaacatgccgaaattcttattaacggcgacagagcccgcaacgtgcggaatacccactaataattgatcctcaggcgactgccaagacttgaacaagaggcggtgatcatagagcggatttaacttatcctcttgcaagaggtcgcgctgccaactatccaaatgatgcttatagtggtcgaataatttgtcaggcaatttatcagtaaaatgagcggcgcgttggtcaactgtatggtcagcaggaactaattctttgtactgaaccttaaaatctaaagcgtcggttgtgtcttgccaccaattgtcatagccgtgccaagtttgggcttgcgtgttgtcttgtaccaagacgttaggcaagagtgtctccgcatgattatctaaaccatataatttatggcttagccacaagttcatcatgtcggtgaaatcgagcgattgtaagttattgatataaatatgttgtccctggtgcaaaatgagctttttagtaacgggaactgcctgtaatttatcccataaattagctacgttgcggggcttaacgttccagtcattgagcccgtgaaccatgatgatgtccgccttaattttgtcaacgttcttgagataattgcgttcatcccagaaacggttatagttaccgcttgctcggtcttggtcggcagtcagttctgccagtttctgatcaaacgcgggttggatttggtgagcgtcaccggcttttaagcttcgtgagaagacctcagcggcgagaacatcggtgtcttcgccttggaacgtatcgggagcgacgaccaggccattatctcgataatagtcgtaccagcttgagatggcggcctcggaaataatcgtcttaaggccagccacgcccgtcgtagcagcggcagttgcgagggtaccgaggtaagaccggccagtcatagcaacggcgccgttgcaccaccaagctttgatagcgatattgccatcacgattggtgaaggcttggcgtttgccagtcaaccattcaataattgcaactgttgaggtcgtttcatcaacgtcaccggtaggggctagcccatccgagtcgattgaaccaattccagctgcatagacgacagcaaaaccgcgcgctagaaagtaatcattgagcgtgtaggacttttctcggctgaaagtctcctctgctgtatcggtcgtcgtggtcgcggttcgagcggctggtagttgcgccgttgttggctggaactcaacatccgcataggtattttcgtccggttcctttgcagtcaggggaacgtctacgttgtgcatttgagcatcaccagcttggtcgttgatgccctgattataaggactagcggtatagagaacgggaacttttaagccggtttcggtctcagttggccgaaggatttcaactttgagcaggtcccgttggccgtcgtggtcagtatctaaaggcgcttcaacgtagacgacgtcacgaatgagcgcgttggtatcaaagacggcttgggccttaccattgaagaagagtggcttttggtcgttaggtaattggtaaaatggtacaaagtaaccccgggtcgtgagtgattcaatcaaggtttgtccattattcccacgtgtatttaataataggtaccaagcataatagagggattcacgatcaaaggcgctatcaccgactattggcaagtgaatatcgcgcatcgccagcaatggatcggccaattcaaaatcttgaccaggtagaaaacccagtagctgaagtcccacgttataaaagacttgattgtttacgatagttgcatcggcgagccattctgataaagtgtgctggctggttgccatgatgttattaaacttgtgggtcaagccgcttgccgtgtgaacttctggtaagcttttagccagcaatgcctggtagacggctggaacagtcgtcagggcgtccatatcaggcgtaataaaatgaatttttgtaagttcggcaatcgcggtttccgaatcagtcgggacgattgcaaattgattatttttcataagtaaattccccattaagtattattagaaatattataccgctaattagtcgagaaccaatgcttcttactgacaagtttataatgttgtggtaggttaattgcaaagtgaactatcgaatggaggaactaagattgagtgattttccaattttatatacgacccaagcagttaatgaagacggcatcgaaggacacgcctatattcccaatggtcttgaggtggccgtatctagtccacttaaggcggtgccgggctcgaatccggaacaattaatcggattggcgctcagtacatgccttaacgcgacgctggaggcaatcgaaaaggagcacggccagacacatcagagcaaagtcgtgactacggtgaagatgtcgcgtgaccgttttgggtaccaatttttcctagatgctcgggtcacgattccggaagtggatgctgaaacggcagcacggtggctcgcgattgtggaaacgcgttgtcccgttgccaagctcgttgggccatcagccaacgtgacgattcaattggcttaaccgttgtgatatggccgcagtaatcattaatcgtagtttgtaaaaatgtcaggggattgattaaaacgtggttcgagttggcagcgattaaaactgccaattcgaaccacgttggtgttaatgatgactgcgaatttgcttgaaaagttggcgtaaacttgggtgctgacagtgatgactagtaactgctgactgagctttatcgacctgttgtagggcaagttgcttcgttttttcgcgttcgattttgagctgcttgcttagtgctcgcgatttccaaaagccgttgatgccgacgacaactggaataatgtgtaataaggttgtggcgggaatgagccagggatgcttactgaatagttgaacgacctgggtatgatgctcatgaaggtcgtcatggatcgttttaggtgttaacatgattaaaccacgctccttaattaagtatcattatcataccttaaaatgtaatcgttgtcatcgttagctggctgacaatagttaaagcgcccatctcaagttgattgatcacttgagatgggcgcttttagttagtacaaatctagattgttactcatcagctttattcatgcgactatgccgaatgccatagccaaagtaaatgatgagaccaaggaggaaccagactagggatgccagccaagtttccatggatagctgggtcatcatgaacaggcacagcaagccagaaataattgggagaaccgggtaaagtggcacgcggaagcccttgatcgcgttgagcttgggattacgccgtagtagcaaaattccaaaagaaacgaaggcgaaggcaattaatgtcccgatattaaccaagtttgccaattggtctaacggaatgagaccagcaagaattgaaatcacgattgtaaccgtcaacatggcgtttttaggggcgtggtgcttatcgattttacctaagaaacgtgggagtaagccgtcacggccgattgaatataatagccgtgagctactgtagatcatcgtaaccatcattgtgaacatgccggcgagggcaccaatcgagataataccggcaacgaagttttgatggacgagttgtaaagcgaacgccactgcatcgtcaacgttcaactgtttgtacgaaaccatcccggtcagcactcctgaaacgagaatgtagaagatggtacagatgactagggtcccaatgattccaattggcatgttgcgcttggcatttttaacttcggctgccgacgaagacacagcatcaaaccctaagtaagcgaagaagacgaccgcggcgcccttgagaattcccgtcccaccaaatggggcaaagggtgtccagttacttggtttaacataaaatgaaccgactaataagaacaatacaatgattgctaattttacgaccacaataatattgtttaatcgaatcgacgtttttaggccggtatcgataatccaagcaatcagacagacaatcagaattgcgaccacgttgatataggtcccgtgggcggggtcaaacgaaccggtgatggctttcggtaacttgaggccaaaaccagcaatgaatgaattaaagtacgcggcccacccaacggcaacggtcgcaacggctaggacgtattcgagtaccagagcccaaccaatgatccacccaatcatttcgccatagacaatgtttccgtatgaatacgcggaaccggcgattgggagcaccgaagcaaactcggcgtaacacattgcggcgacggcacacacaatggcagccaaaacgaaagataaaataatcccgggtcccgcttttgttgcggcaaccgttccgggtaggatgaaaatcccggtcccaatgacggcaccaatcccaagtgcaatcagatcgactgcggagagggttcgttcaaaatgactatctttttgtaaatagcgctccaaatcttctttttggaaaatgcgctggaaaatccccataacatggaccacctttttggttatttgtaacagttagttgtcattatcgacaaatcgtcatgtcaatatgataccgtggttgattattaaaagtcaattagaatcagccttttattattaataactcaatgggatacggagcaagatagctggttaatcatcatagaagctggtgacattgcgactgtcgaggcaatgttcgtgctgacaatagatttgatgacgataacgcgtaaccagtcatggtggggatttaaaaagcgttgtgatggccgaattactagtcatcacttaagccggcggtaacggtgctaagctgaagagaaacgggtctgaatatgcggttgggtagctgttactattgttatttataagttgatactttgttataacgaacggtagtcaaagaatacacacggataatacattaaactgttaattggattcgccaaagcttataatattgttatcaatagaaatttaattttagaatggtgggattaggatgggagcggcgattgatattaccggtcagcacttcggacgcttaatagctgttcaccgagcgggccgggccaagaatggtaatgcgctctggttttgtcagtgtcagtgtggccggacgtgcgtggtggattcctacgttttgcggcacggcaagacgcgtagttgtggctgtctagccgtggaacagagtcggcaaaatatttttaataatccgcaagcagtttcgcatatgggggacccgcgtaatttgaagattcgtgatcaccatacagatgtaagttcaatcaagaagtcgaagcgtaacacgagtggggtcgtgggcgtgagctatgacaaacagtcaggttcctgggttgcgcacttctactacaaaggaacgtacatattaaacaaacattttgcgcattttgaagatgcggttcgggcccggcacgctatggaacagcaatatttaacgtcatctgataactgaaactgtcggatgcccacgttaggattcactagcaaattgtaggctagctaatattgtggataatatttgaaggaactgaagtcggttaagtgtcgaagggcttcgacgtaatgtgtgcttagtctgatgaggatggatgataaattttaatgagttgaacaacgggactggcaatccgctgctcaactttttgagtcggcactaatcaagcttaatgatgacaataccgttgcggtttgcagtgatgagtaatcaatgcccatttgagtggttgatttaacctttcttttgaagcgaagaggttacagtcagtcggagttctgatagaataagcattacacgagataagagggggtagcaagattgtcaacaatgttagtggcggaagatttatccgcagtcggtggaatctcacttagttcagcgttgcccgtattaacggcgatgcagtatgacgtggcagcactgccgaccagcttattatcgacacatactagcgggtacgggacaccagccgttgtcgacttatcgacgtggctgccgcaggtctttgcgcattggacccgtgcacaactgcattttgatcaagccctgatcggctacgttggttcggtcgcactgtgccaacaaataactacttacttagaacaacaaacgctgtcgctattagttgttgacccagtactcggcgatctcggtcaactctatcagggctttgatcaggactatgtcgcggcaatgtgtcagcttattcaacaggcggatgtgattttgccaaacacgacggaggccgcattgctaacgggagcgccctatcaagtgacgccagatttagaagttattttgccagcactgcaagcacagttgaaaactggtgcccacgcagtcattacggatgtccaacgtgctgatcagattggctgtgcctggttggatgaagctgggcacgtgcaatactgtggtgcgcgacgtttgccggggcattataatggtaccggtgatactttagctgctgtaatcgcgggactgttgggccggggttacgcgttagcaccaacgctggcgcgcgctaatcagtggttgaatatggcggtagcagaaacgattgcacaaaatcgaacggatgaccggcaaggggtcgcactgggggacttgctccaggcaattttagccctcaattgatgatggaacatgttatactagagcataattcataattaggaaggtgcgacttcatgagtacagaagtagctagtggtgcggtcgtctatcaacaaaaagatggtcatcccgcttatttattattacagagtgcgaccagtgatttttggggctttccgaaggggcacgttgaaggcaatgaaacgttagctgaggcggcgcgacgtgaaatccgtgaggaaactcaaattgaagcgacactcgataccaattttaaggcgtataccgaatatgacttaccgaatggtaatttgaagcaagtcacactgtttgtcagtgaagtcccaagtggtgtcgtagtgacgcggcagcaagctgaaatcagtgcaattggctggtttgattatgctgctgcccgtgaacgattgacttacgataatttaaagcaaatgttagatcaggctaacacctacattgagcagcatctacaataatactgactgtaaaaaaattactggtgccgtcgcataaacggtaccagtaatttttaaacaatatttttagattggcttaggcctgggtttgtaagtttgcaactgcatcttcgattgttacgccttcagcgaacaattctggatgaagtttgtcagttgcgacaaacatttggcgttgcgtatctaagacaatgctgaaccagctatttgttttttgaaattgcatatgacaaaactcccttctgaaaattgttggtttgctacgagatgcgtgaatcatctatttgaaccttataggtacgttactatactcggtttaccgagctaacgcaaatgaaaagctttacatgaattaaaaaatggaggtttatcaactttgacaacgaaacggatctttgtaatcacgggaccaacggggagtggtaagaccactgtcagtcattacttgcggtcacaataccaaattcctcaggtgattactcatacgactcgggctccccgggaaggtgaggtcagtgggcgcgactattattttgaaactccgacgagttttgccacgaaacattatttagaacacgtgacctatagtggtaatcaatacggttcttcacgagaaggactagcggcagcctgggaacggtcaccactgattagtatcgtcttagatacggcgggggctattacctatgcgcgggagttgggcgaacaagcggtggtgatttatctcgaggttgctgatcaagaggcgctaattcagcgtttgaccaagcgaggagatcttcctagccggataaaaaagcgagttgctagtgatgagtatttgcgggaccaggctttgccagtaggattagtggggcatgcacatgttatcgtgaatgatgattggcaggcgacgcggcgccaactagatgagctggtcactgaatattgtcagcatgatgttgtgacgaaagattagcgctgacgtatggacggtcaacgtaattcacttttacacttgagtatgctaaactaaatagtaatgattatgatttagtgaagtcctggtcagtaggaggcagcaacattatggaaacaccaattgaacaagccgtcgcaattttacgtcgcaatcagtttaaaattacgaagcaacggcaggcattattagattatctggtgacctatcaggaccactatgtggcaatttcggccgttgatgagcacatgcggaccttatttgcaggaatgagtcacaataccatttatcgcaatattaaagagtttgaaacgttaggattattggaattgaaggcccaggctaatcaaaccctggttaaatatcaatgtgatttcaagcatcaacaccatcaccattttgtttgttcaaactgtggtaaggtgacggaactgcaagcgtgtccgttagacgagtatgaagcacaattaccgggttgtacgattacgggtcaccgcatcgagatttacggtctatgtgccaattgcacgaaaaagcaggcaattaatagctgacggggagtcggcttttttgttggccttgtttgagtaaagagtttcttaatttgtgatagaattagtgcattccgaacacgagcatggtttaattatagattagaaagaataacggcaaagcctcagaagggaatgacatcgatggcttatcgaacaccaccatttatttcaccatttgcaattgtttcaattgtccttgcactgggggcaactaacgtggtcgttaataagacaacccatactgtcaatggcgccaaggccactagcagtgtggtcaaaagttcatcagctagttccgcaagtctgaaaaagaaagcggctgatgatagtagcgatgagaataaatccaaagacaaatccagttcagatacatctaatgatgaacagaatagtagttccagtagtagtactgacgagaatgatacggacagcagcagtgctaataagaccagtagttcatcaagttcagctgatgatacgagttctagtgccactaatagtagtacgactgataacaatagttcaacgactgatacgagtgacgatgatgaaagctctgctgctgagtcatcaagtacgaccgcgtcaagctcgacaacgacaacgtcacagtcgacaacggataccactactagcgacgggggcgaataacgaatgtttagtattttagatatgatcaaccacgccttgggttacgttaatgtcaatgtgaagattaagaaccaaatctatatcggcattggaattgcgggtaatttatacctcggttatgtggcaattcgcttgatgcagaatggcgcgtggttacggggcatcttatatatgctcgttttcttggcgctgatttatttcattacgttaaacgtcatttattattttactaataaaactgcgaagtatgacttatcaccacgtattgaaaaattgttgggtggtaagcctaaagaagcgttagcagctgaaaaacaagcacaacaaagtcagcaacaaccatacattcctgcgaacggtatttttgatgggcaggaattgttgcccgccacggtgaagacttcacgtgctgaacaggagaatgtgcatcaaattgttgatcaactacaagcggcgaacattgtccgattagattacggtggcttaactgatgatgccatcattcagcaggcgcaggcaacgggtgaacccgtttatgcgattgggcaaggcattcaaattcctttctcacagttaaagttggagaatcaccggctagttatttacgccggaattaatcagatggaccaatccccggttgggcatattactaaggtcggcttgaccgatgttcatgatgcgcatgaggattataagttgtatttggcctccacggtaatcacagggggtatgagcaagattgcgggccgaacgtcagctatcgagcaaccgggcgattaccaggtaaccgcgcaggttgcgtatgagggaagagaagattaagagtgcttccaagggcggttagtttgtgagcatcaccgttttattgttaagcggagcaaactgcctttggaagcacgtttcggtagccaaattgaatctaaacacaaaacaaccgttttgagcagtggctcgaaacggttgttttgtcggtatggctatttaaaaagcgctaaaatgtctaatggtttttggaagcggtgggccactttttgatggtcggcgttagggtccattccccagactgccagtccaaaatcaacgttagcggcctgggcagtttgttcgtcactgacggaatccccgatgaagagtgcgttttgtggcgcaacgttgactttttcgagggctgtgagtagggggaggggatctggtttgcgcttaggcgtatcgtccgcactgattgtgacagccatccgcatcatgaatggatacgagcgcatcccactttctaattcgtttcgtcgttgggaagtcacgattccaagtcttagttcagacggcaactgttcaaagaggctggtaatgcctggataaagttcaatctgatcataatggctggccatgacatcttcgtattgggcctgaaagtggtcaaactcactggctgcaatccccaattcagtcattgcttgttcagcggccatgggaaaagtcttctgcgcttgggcaggactaaatggtttgccataagtagcaagtacctcacgcataaccgtcgtgtaagctggttggctattagtcagcgtgccgtcaatatcaaacattaatgcttggtaagtcatataatcgttccttccaaagtagatttaactccagtatagcaaattcgtccttgacagtggttaggacaaccattatagttagattaacaattgatgaggagctaatgatatgtcattaccgttaaattcattaaaatctagaactagcttttacttttggtattttcgctagtgtttgtgccggctgcagaggtgcaaacacgaatccgatgtttgcatcgatgcggttgccaagagtattttgtgatttgacggcgcccatggatgtttgaaaattccaagggtggctaataagtttgtttctgcgtggtggcgcaccctttggaatttcaaggggtgcgcttttttgaccctagtccagtccgcttccaccaacaagatcagccaaacttgggaggaatctttatgtcaattaattcagaaacacttgttaaccatatgaatcatgaaattgcggcgattcagccgtctgatattttggcgttcaacgctgaaatcgcaaatattccgggtatcgtgcgtttgaccctcggtgaaccggattttaatacacctgagcacgtgaaacaagctgcaatcgaaagcattgaagcggatgaaagccactatgcaccctcgaacggaacgttggccttgcggacggctgccgctgaattcttggccgctaagtatgatgtccattatgatcctgctagcgaagtgattatcacagctggtgcgaccgggggcatttatacagcgttgacttcaatccttaatcctggggatgaggtcctgattccaaccccaatttttccactgtacatcgcaatcgttaaattatctggggcaacaccagtcttcatggatacctcggacaatggcttcgtgttatcgcctgaccagttacaaacgacgttagcagcccaccccaagacgaaagcggtggtccttaactttccttcaaatccaaccggtgtgacttaccggcatgatgatctgaaagccctggccgcagtgttagctgatcaaccaatttttgttttgtctgatgaaatttatagcgaattgacgtatggtgagcctcatgaatcgattgcaaattacttaccaacacaaactattttgcttaacggcgtctcaaagtcgcacgcgatgacgggctggcgaatcggcatcatgtgtgcgccgaaagctatcacagcacaactgggtaagattcaccaattcacagtgacttcaacgacgaccaatgctcaagcagctgcgacggaagcattgaaaaatgggttagatgatgcccaagtaatgaaacgtgagtaccaagaacggcgcgattatttgtatgatgcacttaatgaccttgggttccaatcagctaagccagaaggggccttctatctcttcagtaagattccagccgggttgccacaaaatagtatggctttttgccgtgaactagcccatgaagcacgtgtcgctctgattccaggtagctcattcggcccgggtggtgaaggctatgttcgaattagttatgccgcttcaatggccgatcttaagacggcggtcacgcggctcaggacgtacgttgccagcaagaagcagggggcttaaagatgaaaattttaatgtatagtgttcgcgatgatgaacaggatgcgattcaagcgtgggctgcggctcatcaaattcaagtagatacgaatgatctggaattccatccagaaactgccgacctggtcaagggttatgacggcttggtcattcagcaacgcagtccaattggtggtgatgctagcttataccaatcattagctgcggccgggttaaaacaactaacgagtcgtacggctggtgtggatacaatcgatattccggcagccaaggcggctggtcttgtggtcacgaacgtcccagcctattcgcctaattcagttgctgagatgtcggtggcacaaaccatgcgcttgattcgcaacttggaaatgtttgatcaacgaatcagccaacagaattttcagtgggcgggactgcaagcacgagaaattcgatcattaaccgttggtattattggtgcgggtcgtattggtggcacggccgctcgacttttccacgggttaggtgccaaggtgattgcctatgacgtggtacgccatcctgaactcgaagacgttttaacctacgttgacactaaggaagacctattgcggcaggcggatgtcgttgatttacacgtggatttgaatgagacctctgcggggttgatcgatgcggcagccttgaagttaatgaagacggatgcctaccttatcaacgcctcacgcggaccagtgattgtcaccgatgatcttgtggcagcgctaaaggccggtgaaatcgccggttgtgcactcgatacggttgagggtgaaaatgcgttatttaaccaaaatcatcagggtgaggtgcttcaagataccaacgtggcacaattaatgcagatgcccaacgtcattatcacgccacacgtgggtttctatacgaatttagcggtcaaaaacatggtcgatattagcctggatgacgtcttagcaattctaaatggtgaaacgacggcccacgccttttaatgatggcgtcagccgctactaccagtatggctgtaggagacggtggctggtcaaagtgccccaccggttaacttgttcggcgactcgctgttcgataactagcttatagcgggactaatttggtggtgcgtccgcgactgggcttcaggtgtactggcaatgaaataagccttccaagcatattgcttggagggcttatttgtctcttgagtcggctgactggtcgtgactaactagctagtagattcggctaaccagccattatctaataactggtgatagtgcttaccgattggcacccacagtttagcttgcagaatgctacggagctcatcccagaagagtggatcgcgttgttcattggtggataaattcaattttaagtaggcccccgtctcagtcttggcaatcacaaagggataaaagactttgataatctgggccgctataatgttagtcatgttagctgcttggtcaagtaacatattatcgtctcccgttacaatgcagatgattaatttcttaatagttctaggttagcagtgattattaaagaaatgattgcggaagcgttaacaatttttaaagttcagttagttaaaaccactaattgtgaaaattatgcgccggacgcttcggtggctttcagtagtggtatgattaaaagcgggttaagtttagttgttagaataatataaattttattgaaatcattgtctaaaaattattcggccgtggcagttccaaaaagaaaagcgaattattattggcttttcacgaataatgttcaatattggagctgttattcagctattttaactgaaaacagtgtagctgtttctcactattttatggatatcgaacaatatttagctactttttgacaaaattactaattatgtattaaactatttaaatagcattaacgaagaataaggatttcttaactctaattattaatgcaataattctagaccgtcagtcaacaggctgatagagaaagcgaaggtgactgcaatgtcaatgatcgaatttcacgacgtcgaaaagtattatggtgattttcacgccctcaaaaatattaatttaacgattaatgaaggtgaaaaagttgttttgatcggaccatctggctcaggtaagagtaccttgattcgaaccgttaacggtttggaacgtgtccagtcaggtcaattgttagtcaatgggtttgatttagccgaccgcaaaacggatatgaataaaattcgcaaaaacgttgggatggtgttccaacactttaatttgtacgctaacaagacggtgcttgaaaatatcatgattgctccccggttagtcttgaaacggccggaagatgagaataaaaaattagcgatggacttattagatagtgtcggtctggctgacaaggccaatagcttaccgagccaattatctggtgggcaatcacaacgaatcgcgattgcacgttctttagctatgaagccgaagtgtctcttgtttgatgaacccacctcagcactagatcccgaaatgatcgatgatgtgttgaacgtgatgaagagtgttgccgaagactccagtatgaccatgttagttgtgacccacgaaatgggctttgctcgtgaagtggccgatcgggttattttcatggctgatggggaaatcttagaagatgatgctaaagaaaagttctttgatggtcagccgtctaatgaacgggcccgtcaattcttgagtaaaattattacacactaatttgtaggggaggaccacgaatgaagaagctgaaacgactaattggcgcactcggcatgcttgccatgctagtggtggtcttaactgcttgcggttcacggcaatcattagcaaaacaggatgttttgaccaatgataaagctagtaagacgattacgtggggtgttaaagctgatacgaaattatttgggttgatggacgttaaagataatcaaatcaaggggtttgacgccgacattgcgacggcattaacaaagcgggtgctcggtaagaatgctaccgccaagtttgtccaagtaacgagtcaaacgcggattccattgttgaagaatgggaacattgatgccattatcgccacgatgactatcacgccggaacgtgaaaaacaggttgattttacgaattcatactttgatgcggggcaatcactgttggttaaaaagggcagtgccattaaatcagttaaggatttgaataagtcgggcaccaaggtccttggtgtgaccggtgcaaactccgttgagaacattaagaaagcagcgcctaaggctaaggtgttggaattatccgactatgctcaggcaatgacggcgttgaaatctggtcagggggtcgcgttgactactgataatgggattctttacgggatggcgtcgcaaaacccagggtacgaagtggttgggggtaccttcacgaaagaaccatacgggatcgctgttaataagggtcaggaaccgttaaaaaaggctctgaataaagcgctcaaagaaattgaagcggacgggacgtacaaccgcatcttgaagaagtggtttggtaacgtggccggcttcgactataaggaggcgtcacgctaatgggatacattctaacgcactattggtcagagctgattcaaggactcggatatacgttgttatccagtgtgattgctttggtattcagtacgatcatcggaacaatgtttgctatctttgaagttttgccaagtcgtacgatgcgcatcattggtcgagtttatattgaaattttccggaacattccattgttagttattgcgatgttcttctacgtgatcattccaatgtatgttgccaagattgatggttttaccgcggggacaattgggctaacaatctatacctcgtcattcattgcggaaacggttcgggccggaattcaatctgttgatcctggacaaatggaaggcgcccgtgctaatgggatgacgtactggcaggcaatgagtaaaattgtcttaccacaggcatttaaaatcatcattccaccgttgggcaaccagtttattaatctggtgaagaactcttctgtcctagctttcgtggctgggttcgacttgatgtaccaagcaaattcaattgcgtcactatcgcttgatacgatcaatagctacgtggtcgtaggggtcttttacttaatcattacgttgccactgagttattacatgcggcacttagagaaaaaattagcaaactagaagggggcgacgattcatgcaaaactttattcaagcgtattcgtggataaatatccggttcttgctcgaaggactctgggtaacggtggaagtgtccgtcgtttccatcattgccagttttattatcggttcagtcctaggggtgcttcggtacgtcaagattaaatatttatcggcagtggttgggtttgttgttgacattattcgaaacttgccattgatcttaattatcttctttacttactttggcttgccacacttgggattcaagcctgggatcattttcgcagccatcctcgctatgacgatttttgaatcggccatgttagccgaaatcattcgttcagggattttggcggttgattacggtcagatggaaggcgcccgggctaacgggatgagctatgtacaagcgttatggcacattgtctttccacaagcaatcaagaagacgatcccaacgattgtgagtcaatttatctcactgattaaggatacgtcgctggcaaccattattgttttacctgaattattaaaccatgcgcaaattatttatggtcagaactcagcgtatattttaccgatgttcttaatgatcgcagtcatgtacttcattatttgttacgccttgtcaattctgtcacgtgtgttggataagaagttagcgtaattaaactggtgggatgatggctgaaatttcttaatgaaaagaccaaacaagcaataatgctttgtttggccttttttataaaaaatatttaaatgtcttgcaaaaaatagaaggcgtgataatatagttattgaaaacgttttctataaaactgaaattaaggattgtaactcatactctttgaggcattaccttttacttgttgaaatatacgggtgaagtgggtgcctcaaggagtttttttgtattgaaggaggttcagtgatgtttggaattaaaagaaagaaagttgatgtcttcgaggtggttacaccaattgaaggtatttgtataccgatcacggccgttatggatgaagtgtttgcaaagaaaatgatgggtgatggatttgctattaggccgagtgaggacactaatcaagttgtggcaccgattagtgggaaaatcgttgcattacctgaaagtaaacacgctattggcatcatggatgagactaggggcgtgtctgtattggttcacattggcctagatacagttggcttaaatggtagaggctttacggcacacgttaaattaaatcaagaagttaaagcaggggccctattagtgacgcttgatcgccaaacgatggcgatcgcgggattagatatgaccaccatagtcgtctttacagaaggttatacgggcgaagtgccacttggcagtaagtttcatcaacaattagcagccggaacaccagttttaaagcaagcataaactatgtaaaggagtgcgaattaaaatgcgggtggtgaagaaaattaataacaacgtggtcgtttgtcttgatcaacatggtgaagaattggtcgcctttggtaagggattaggatttcaaaaagtcccgtatgagcttactgatatgactaaagtgacgatgacattttataaattaaactatcaatattatcaattactaaaagaaatacctactgaaatctttgatttgagtgcagcaattgttgagcgagcgcaggcactaattccaagaattttgaatccaaatatgatttttagcttagctgatcatattaactttgcaataacgcgactaacccattataaaagcgcccagttaccattttcatatgatgtggagcaattatacccacaagaaacggatgttgggtattgcgccgtcaggttaattaatcgacggctaaatattcaattaccagtttccgaggtcacagcaattgccatgcattttgtcaattctcagactaatgatttagcgaccaattcaagtgtaaatagcgacgatgaaatgataaaaatcatcacaaaaattattgaacaagaatatgagcttagaatcaatcaaaccgaattcacatacaaccggtttgtcatgcatttacggtattacattaaacggatgaagaaacatgagcaaatttctgaaaatgataattctaaattattcaatacgatgaggcatgatgagcctgaaatttacttggtagcaaagcgaattgcagactgcgttgatagtcaacttgatactaatagtaatgatgatgaacttttctacctaatgatatatgttaaaagaatcgttaataaaataaatactcaagcgtaaccgttaattaatggaggtgtatgcgacatgaaaaataaggataaacagtatgaaaaagtggcgaatggtgtactggaagcagttggtggtagtgcgaatatttcttcggtgacacattgtatgacccgattacgttttaatttgaaggatgaaagtattcctaatgatggtgaggtacagaatattccaggtgtgattggtgtcaatcgcgctggtggccagtatcaaatcattattggacaagcagttagcaaagtttatgatgcgttacttacggtggggaatttaactagaaacgcgccaattccaattaatgaagatttagataatcgacctaaagaaaagttaacgtttaagtctgcgggaaatatgattctaaataaattggctggatgtttaacaccattgattccgatgttgattgctgcatcaatgtttaaaatgtttgcggccattttaggaccaagtatgttcaatattcttggtactaaaacatcgttgtatcagttatttacgttggttggtgatgctggattctacttttttccaatcatcttaggatatacagctgctaagcaatttaatacgtcacggattatttcaatgtttttaggtgcaattttgattgatcctaatttaattaaaattgtgactgctggaaaggcatttaatatcttcggtatcgcaatgccattagttaattattcaagtacggtcattccaattattttgtcggtttgggtaatgtcgtatattgaacggttctttaagcgttatgtaccagagtcaattagtacgattgttatcccaacgttgacgattgcaatcatgttgccgatttcgttatgtattttaggcccagcgggaaactttatcggcaattacatttgtacaggaatattagcttttgggaaattaggtggcttgccaacgatgatcgcggttggagtggttggtgccttatgggaaatcttggttatgaccgggatgcatctcttaatgcttacgacgatgatgatgatttttgcgcaatcgggccatgaaaactttgtcacacttggcgcagttgctgctagtatgtcggtcgcgggcatgtgtttaggtgcggccttacgaattaaggaccaagatcaaaagacccttgcttggggttatttaatcgctagtattatcgggggtgtgactgaaccgggattatatggactagcaattcgttataagcgaccatttattggcatgatgattggcggattttgcggtggcttatatgctggcctgacaacagttacagcttatgtcatggtacctgttgcaaactttttatctttaactgcgtatgttggcgggcaaacatctaatgtgattaacggtgtggttagtggcgtgattgcgtttgtagcagctgctattgcaacttatgcgattggtgttgaagccaatacaaacaaacaggggactaaagaatttaaactagtggaggcttaaaagctaatggaaagaaaagtaatcgttcgagctgatgatttaggttattccgatgcagttaatgttgggattgcacgaacagttcacaacgggttaattaataatgtgggtgttatggtcaatatgccaacgacgatgtcaggattagccatgattaaagatgcaggggtttgcttaggtttgcatactgttatatctgctggccggccattaacaaatccaaaattgattccgagcatcactaatccagatggtacctttcgtcattcctcggattatcgggcggctatggcggctattcatgattttgtcgatcttaatgaagttgttttggaaatcgaagcgcaatatcaaaaatttgtagcgttagttggtcgccagcctgattattttgagggtcatgcggtagttagtgataactttgttaagggattggaaattgtgggtgaacgtcatcacttaaatattttacgctttgcagcaggcccagatagtccgagtgtgctatttaagggaaaggtattacatgtttttatggaaagtatgggcaaaaactataacccttatgaaacgttgaaacgtgcggcactagcccaatataatgacggctatgctatgatggtttgtcatcctggctatttggatgactacttattacaacattcaagcctgacagttccccggacgcaagaagtcgcaattttaacagatcctcaaatgcaggaatggttagaacgacagcagatcaaattaatcaaatatagtgaggtttaattactaagcgttaaggtaatcggtaagcagattaaattacttattcaatgcgcgttgcaaagcataaaaagagcgttgctactgaaaatatcttcagtaacaacgctcttttacaagttatcaagaatttaaattaagcattttgattttgctgctgcttccaataatagattgggaacccaacggccacgataaccaaggaaatcagtacaccagataagtctgagccaatttcactgataatcacgaacagtgcgcccagaatcgcaatcagcggtgtgatcggaaatccgggtgtcgagaatggtcgctcagaagctgggcgtcgttttcttaaaataaagacaccaacgaaggttgccacgtagaagcagtagaccgtgaagatacagaggtccgataagcgatctggattaaagaacaggatcataatactagcataaacgagaatggcaatggttgcggcgatcggctcgtgtgattttttgtgcaagtaactgagttgtttagcgaatggcagctgattctgagcagccatggcgtacacgatgcgggggaaggtcataatcttgccgtttaaacagcccaccatcgagatgataatcccaatgttcagtaggcgcccgccaattgtgccaaacgccgcttgggcaaagtacagcgtcgtttgttgcccgagtttgtggatcgttgccgcgggtacgaagtggagaatcccatagctgactaaggtatacgcaatcaagaccattgaaatccctaaaataatggcttgtggtaataacttctgcgggttcttgatttcgccacccaagttagcgactaagatccagccatcataggcaaaaagtgttgcgaggacggcaaccccgaaactacccgttgattgggtaattgtatgtaaagactgtcccagcgcattctgattaccatagaagagtccaaaaataataatagccgcaatcggtaataatttgcccaacgtggtcgcaatttgaaatgcggcgccccaacggttttcgaacatgttgaggattccaatcaggacgatgacgccaatcgagagtggcgcctgccaacccgcctgcaggttgaagaaaccaactagtaatataccaaggtaagcgctaattgaagcgatgatagcgggaccgtagacggcgatttgcatccaaccagagagaaagccccacaatttaccatagatttgttccatgtagacatagagcccgcccgtatgcggcatttgggcaccgacctcggcgattgttaagcccgcggtcaacgtaatcagtccacctagtaaccaggcgagtaacgcagcgctcggtgagcccgcactatcaaggactgatgattgcttgaagaagattcctgacccaataaccgtaccaacgacgagtgaaagtgctgaccaaaaaccgagtgaacggttcagggtcgttgcttgctttgtttcctgcattaacctgaaatcctcccttgaaacaaccaaattctaaatgattgcacttagcataccagagattaatggtgatgacaatcaaatatcgttggttgtggccggtttttcgcctaaaatccgaactaataacgatattttaataataaagttcgacaagactcaaaataatcagtgttattcggttggtgattcgagtttcgacaaaataggattgggcggcgtggtggctttaaattaatttatttatcttcctaatattagcagggttatttaacgggtcaggttagtcattaacttagtcattaattgagttagttgtgcccactcggattgattgagaccacccttagcagtcaataaatccggcaaatcatttaaagcaattcgtgttgcggttccctgaggtgtcagagtgagcaagatgctccgttcatcttggggattccgatgacgtgtaattaaaccagcttgggtcatccgctgtagcacgggcgtcagcgttcccgtacttaaatttagctgggtgctcaacgttttgaccgtgacagcgtgcggcggtgtcgcatagagtgcgactagaaccaagtattgtggataagtgagtcggtgtgctgtcaaagttggttggtagaggcgttgaatggcatggactgttgtgtaggttgaaaaacagacgtggtcttcaagggggcgaattgtggttgtcttcatgataattaccgcctttcatgcgatgagtattaagtgcggagacgttctaataatgattgtgcacaatcgattgattggattatagcacattctgacaatctgtgggcctagttgccctagtgccggtgggatcttatggtctggtggtcacgttcagtatgcaaactgatgattgtgggtaccacttgcagtgacgtcatggtaataatttttggttccttcctaaaaatacagtataatgctacgagtaggtaagagagtggggttagattgatggtaattgcaattgtggtgttgttgatgctgctcagcatcggcttatttgggttgctgttagccggtgccagacggcaagcagcgccattttttgaccacagttttggtttcggcatggttatcggggccgtgacggattttcttgacacacttggtatcggaagtttcgtcgtgtccacggcaatttttcaagcgagccattatttaaaggatgaacgtaagctacctggaactttgaacacgatgcatgcgattccgaccgcgtttgaggcgtttttctttgttacagcagttgcggtcgagccagtgacactgattagtttagttttagcagcaacgctcggcgcattactgggtagtgaagtcatgacgaagcttaatcagcggtggattcagttaatcatggccggtgcgttagtcatcactgctttactgatggcagcgaagttattaggttggatcagtttgctgggagttgctaatcaggcgacggggctatccggttggaaattattggtcggcattggtggcaactttatcctagggttactgatgtcagccggagtcggactgtacgcaccgtgtatggtaatggtgtattttctgggattgaccccgattgccgccttcccaattatgatgctgtcgtgcgcattgttgatgccgatttcggcagtgaattttattcgccatgaccgcgtcgattatcgcggcttattcggcattattttaggcggtattattggcgtggtggtggcagcgaccttagttaagtcactgtccttaacagccctgagttggttgatcgtcttagtgagctgttggacggccttttcgttatggcgtgccgcgcaacgccggaaaaatgtgttatagtcaacggtatgagtggttaggctaaccaagcctagccacttttttgtcgttgtttaaaatgatcgtcaggctgctagaaaaaataacggtcgctggttgacaatttatacagctggctgtataaatgaaagggcaggtgattaagatgaatcatgatgaaatggtggcgcggcaagttctgattttagctcgtcaaatcaagcggcgtcgcaaccaacatttgcggacggtggggttaacgactcagcaagcggatgcactgaccttttttacggatcagccaggtcgcacggtaaccgcgtttaagacgtatcaggaaattacccatcagacggccaggatgatcgtgcaacgcttgcagacgcgcggatatgtacaattagtggtcagtccaacggatgcgcgtgccaagcaagtggtagtgaccccgagtgggcgtgctaaacgcgagcagctccgtcaacatggctggcagacgagtgcgcaaatgtttgcccatttggatgccgaacaacaacaggtatttttagatttgttacggcaagttaatcagaatttagaaagtgatgagaattgatgaagacgcgtttatatacgccggatgtaaagttagtgttaatggctagtttcttctttttaatgagtccaatgttaatcaatcccgtgattgcaggatttgcgcacggtattggcgctagtagtgtgcttgccggtacgattgccgggttaacgaatttgacatcgctagtgctccggccacttgctgggaatttaaccgaccgggtctctaagtaccgtttgaccttcgtggggggctgtttgttgctactagctagtttaggttatagtttgacaaccaacgtgacgttaatcatgttattgcgaattttgaatgggttgggatataccttgtgttcagtttgcatggcaacctggatggctagtttattgccacccgatcgaattggctctggaatgggcatttatgggctagcgaatgcgcttggaatggcgtgcgggccggcaatcagtgtcttcttgtatcaacattacagttaccagagtgttttttggttagcagcgggctgtagtttactgctcatcatcatgattcaattcgtcggtgatcatggtgaaccaattgtgacgcctcaaacggctacgactaagcaccatattcgcatcgtacaaccacgagtaatccccgtggccttgattttgcttttattttcattaccatattttgccacccaaacctatattgtcagctacgtcgctgcacggcattttcatgtggcagcgggggtatttttcccggtgtacgcgggtattttattagtattgcgaattattctccgcgattggttcgaccgggtgccatttaaacggttcatctggttatgcttaatttttaatctattaggattgattggcttaactgacatgaacaattgggcgatgctactgctgggtgcagcaggactggccgccggatacggtttgatgttttcaatttgccaagctaaagcattgatgctcgtgccgaaagctgatcatgggctagccaatagtacgttttatattggtgttgatctcgggatgtcacttggccccatcattggcgggctgattagcagtcaattaccaatggcgtggttttatcccgtgatgatggtgacgctgccgttgattatcgttgtttacctagtcagtcgtcggcagttagcttagccaccaacatgctggagaaggttgttcttggtatacacatgattatgaattttttcagtaggggatatcaaaaagtcacttcaagtttacgactgcctgaagtgactttttatctgcctttatataaacattttgatgccaaaataaataataataagaccaagaaatggcgttaatacgcggttgaccttatctaaatttaaatggcgaatcacgagtggtgtaatgattgcgccgataattgcgccaatcatgaggaccaatcctgattgccaagcaaaagtactagtaaagagatggccgattaaactgattgtggacataacagttaacacataggtggcagtaccagcggcttcaacggccgttagcccaagaattgctaacccggcagccgtggtcgcaccaccgcttaagccgccaatgccgaccatcaatccacttaaaaggccaaagaaggcagcttgccaaggttggtgaccggctgtagtttgtttagaatggtgaacatacttgattagtaccatcgcacccataatcaaaaaaattgtcccgacaatccagttatacagttgttggggaataaattgtgcgctgaatgtcccgacgatgataccgggaacggccgcaatgatcatttgattgccaatcttgaaattgacatttttgattttcaactgtgttagaaaaccaaagaataaggctggtaaggcgacgattagggaggttggtacggctaccgcggttgcaaggcctacttgactggttaagacacctaggtatagggcagcacctccgccaccaatcagactaacgaagatgccgattagtaatccggataaaaagacaaacgtagtgaattcccccttaaattgtataattataccttaaacggagtacactccgtttgtcaagtgatgcgtaaaagtgtatggtgaacttaagtaaataggagggtgtgtcgaatgcgaaaggatgcacaaattaaccaacagaaaattttgactgctgcgcgacaactctttgccgcgcgttcaatcgaaaccgttagtatgaaagatattgcgacggccgctggtatcggtcccggaacgttgtatcgtcactatgcccataaaagtacactatgtttggcattggtaacggaccgagtcgcaacttttattaaaaccaatcaagtctacttgaccacgacctcggtaggtgcagcggcacgttttgatcatgttattggggaatatttagcgattcgtgagcacaacatggcgttattaatgaatgtcgaggccggtgaacctggtcgccgtcaattttatcagagcgaactttatcaacaattatgtgacctattaacgcaactggttcgtgatttgaagccaacgctttcgaaaccggcatgtgagtttcaagctgatatgttaattgccatgctgaaggggactagttatgcttttcaacgtcaatggcgaggacggtcgcagtccgaactattggcgcagttgcacgcgttaatggtgactgaatgatgttcactattggcactagtggtttggcgattaacagagtgggttgattgttaaatcaaaaaagatggttctaggcggttaatcctagagccatctttttgaatgagtcgtttaagcaggtgtcgccacgtatttttcataacgttgggcatcgacagtgttgagttcgactgttaattgggtgccatcagctaagtaatccgttttgagaatgttggcgtggtcattcaagtaagccactacttcaccatcattgaacgggattaataacgttgttgtcacgtaattcttaaagactttggctttgatcatactggtcaaagcttgtagtgaggcctcatcacgcgccgtatagatgagttgatcatcttgctggttcgggtagtcggcttcggttaaatcagctttattgaaggcataaatcataggaacatcgtgcacaccgatttctttgagcgtcttttcagtggtcgccatcatttccttgtaatggggatcggcgtagtcgatgacttgaatgagtaagtcagcattggcagcttcggctagcgttgaacggaaggcgttgatcaagttatgcggcaagtcgctgacaaacccgactgtatcactgagcagtaactgcttattgtcagggaaggttaactgacgaatacttgtatctaacgttgcgaaaagcatgtctttttcgaagacttgcttatcttcacccttaccgaacagtttcactaaaccattcatagtcgttgatttaccagcgttggtataaccgactaaagcgacgttggggagcccagctttatcgcgttgtgaacgtcgcactacttcgtctttattgagttccttaagttcgtgcttcgcgtgactgatccggtcttgaattgtccggcgatttaattccagttgcgtttcaccagcaccacggttggtaaagcccccgccaccaccagcagcggccccagcctgttggtcaaggcgattggagatactcgttcgtaatcggggaagttggtattgtaattgggcaatcttaacttgcaatttggcttccttgctccgcgcacggttaccaaaaatttctaagatcagaccagtacggtcgatgatctgaatgtccgtttgttcctctaagttacgcacctgactaggggtcagatccgcgttgatgaccataatgtgcaaatcgttggcggctgcgacttctttgatttcgacaactttacctttgccgaagaaggtggccgggttgggtttttccaatccttggtcaattcgcagggccgcgtgcatattattggctgcaacgagcgcttctagctcggacatggcgtagtcgtaattggcgaccgttttagacatgccggcaatgatgacttcttgtactttttgagcgttggtttcagacatacactcactcctaacgtgttatgattgcattaagtataacatgtctaatcaaaatattacgacttcgggtattagggaggaatcaaaaatgggttacgtgcttgatttgcggcggcgagttggtcaccaaccgctagtagtggccggtgcggctttaatggcccaaaattcgattggcaaaattgtcttgatttatcgaaccgataaccactgttggggcttgccagctggatcgactgaaccgggagagacggtccagcaaacggcgcgacgggaattgaaagaagagactgggctgacggtgggtgagttaacgctgatcgatgtctatagtgggcccaagatgcactatcagtatcctaacggggacattattgacagtgtcaccacgttatatcgcgccaatacaacgggtggtgaattgattcaagccaccgatgagacgagtactgcggctttctttgctttagatgctttgccgacaccgttgaccccactgacaaagtggatgctttgcggtgagtaagcttgaccatgccgatgaggtttgctatagtggactgaaatattaagatgaattgtcaccggacaacgttaacccaacttccttaggtcattgtggaagttgggtggacgttgtcctttttattttgaggaggaattgataatgacgtggatttatttaattattgctggattatttgaagtggtatgggctacgatgatgaaattaagtaatgggttcagtcactttggctatgctgcggccacagtagttggcatggtcttgagttttggcttcttagcattagcaaccaaacacttaccgttgagtattgcatatccaatttggaccggtatcggtgcggtcggtgcgataattgttggcctggttttcttcaaagatacaattgcacccatcacgtgaatcttcattgcaatgctggtcattggcattattggtatcaaagtcacgagttaggattgggggggtgttagtgggtttgtgattcatcagtgaagccccaacagcttttcaatatttttataaaagaatgaccacaagcatgaaagcggtgttataataactttagaagttaaatgaatatttgggttattcttagacttcttccgacctgagatagacgcactgttgccaagactttacaaaattttcttgttacacccggtcaacgcactacctctcggaggggtttcttaatttcgtcagtaattctgtgtatagtcttggttgagtacaacaaatagtgaaagaagtgacgtctgatgatgatgtatccgtatctgaatttaggccccagagatggcgtcttgataattgcagctgctattatgttagctttaacggtagtttttaattggtcagtctgggaacttttgtttgctgttgtggcagtcgtaattgcgttcttagcaggaagcatgaaaccgtctaagaagaacgtgcttgcttttttgaaaaaatagtttgaattggggtagcatacctgaattcttcaaacacgtctttaaccagcaaagtttaaggacatcattgataagatagccgagttggttctctgtcaattgatgttgcgaatagtgctacgggtgcttagtcaaacaatggcgagcacctttttcaattcgaattgttcaatagcccatgattaaaatacaaataaagatatctgtcgccagtaatcacgtatttagttaattaccaacaacagttatttcagagccaatataaaaacactcgcgaccagtcagtggttgcgagcgttttgtttgatgagcaaaattataagtgttgattgactttcacgtcagctaagtcttgcgcataatcgacgacgcgaatttgatcgccattgatgtcgatgcgagtgacgctcccgtttttggggccgttcgtgatgtcgatttcaggagcaaaatgtgcgaccatactgcggattgtcgtgccgtgggtaaccacgaggactttttgatggtgatcgtggtgagctttcaagtagtcaaagccctggttgatccgttcccagtacatcgagttgtcttcagcttcatgccaagggtcgatttcacgcatcaggtcgcgagtctgatcgataggcacgtgttcaagaagttcgtgcatgctggtgaccccgtattggcggccaactagtgaccaggtccgacttgaatcgtcaccttcgaaataaccatagaaaacttcacgaaagttcatcagtgttttaaagggctgggcggtggcacccgccgcttgtcgaatgagctgagcggtgtcgattgcccgcttagaatcactgctgtagtagtagtcaaaagccgtgttcgctagtgcttgaccgaccttggttgcggtggcttgtccgtattcagttaacggcgagtcagaccagccttgcatgcgattatataagttgaaaaaagtctgtccgtgtcgaacaaagtaaattgaaaattgagccatgtgtttctccttatttagtcgagatggtctttgcggccaaagtagtctaacgtcacatcgttgtcgctaattgtgaatttcgtgacgctcccattttggggccgtgctggtgaggtcagtgcggcaaaacgagcagcaatactgtaaatcgtattgccgtggctgacgaccaaaactttgtccccgtcgtgatggtgagcacgtaacgtatcgagaccgccattgacccgttgccagaattcggcgttattttcggcgcgatggaacgggtcagcttctttacagaaatctttggctttttcgatgccgtattgttcaataattgcggacaaactaggtgcttgatggggcgcaccaaccatgaaccaggtctgcgacgtatcatcaccttcaaaatagccataaaaggcttcacggaaggcagccattggttgaaccgtcaaatcggtattgccactggcaggaagaattaattctgcggtgcgcattgcccgcgtcatgtcactggcgtaaacggcatcgaaatcaataccgttgagcattttacctgcattgcgagcgtcctgttcgccgacagctgtgaggggggaatcacaccagccctgcattcggcggtacttgttaaagtaagtttgaccatgacgaatcatgtaaacggaaaaagttgccattatttactcctctacttggtgttcaaaactaagccataatgtgtttagtttaccataaaatgcactgcgattaattagcagttgctaaggcttgtcgaatctgagcggccgtttgcttattcccggtaaagattaagcggtcaccgtacataatcgtcgtatttccattgggcgcgatcagtttccgattacggatgacttgactaatggtaatatcctgagcaaactgtaagttcttaatttgaacatcagtatagagatggttgaggacccggacttcgtagatgctgttttcagtatcattgagcaatagcaaggttgacggtgattcaattaaggcgcgcagtaaagtaatgttggcctctggtgtattgtagacttcgacgcctagctctcggagttcatcttcatgttcgttgagcacattgcggtcttcaaaccgaacgatgatccgccgtacaccgtatgctttggcggctttagcaagctcgtagttacgttcggcatcaatatggccgagtaccaaaatatccgtgtcaaagacgccgtgatcctgtaagtcctgggctgtgaagttttccattaaggtcactggcacttgcgcgtggtaggtttgataattctcaggatgattcgtgtacattgacacgtcgtaccagccttttcgtagctgttgtgcaacgggtacggtgcttaagttagcgccgataaagtggaccgctgttttgaccaggtcttctttttcagctgaataaaacttgttaaaaatcaggggtgagatgacacaagtgagtagcgctgcgagtaagaaagcgccggactggtcactagtaattgtcttcattgacttggcaactcgaagaacggctaataccattgtcattgtcgttgcagtcagcgcggtaccggctaaagcattggcttgcttgaaccgtaactttaggacccagtagccgccaatcttggcaaccatgtatgctaagaaaaatagtggaattaatagtaaggttttgccacttgttaataaggtccgtaagttcaaatcgacgccagtcgtaatgaagaaaatcgggatgaagaagccgtaaccaatagcatccaagcgttcgcgggtcgtttcactagggttcaagagtttcaagacgattccggccacaaaagcgcccaggatgttttcagcaccgacggattcggccaccgtgaccatcgttacaatcaagaagaaggctaaccgaatatctagttgtgtcgtcgatttgttaatattttgatagaagcggaagaatggtttgaaccgtaagagtaatagtgcggcaacggctaaaatgagtaatagtaaccagagactttgtgagttactgccgtagacggatgcatagagcgtcagtcccatcatcggtacaagttcaccaaagaccgagatgagcagaatcgtttgtccgaaagccttactaagcaattcctgttcttttaaagctgcaattacaataccaagtgaaatcgtgccaaataaaatcgcggcaagccagaaatcactgaagaggccgctgactttaaaagcagcggcgagtaacagcgatagaacaataattgtgctgtaggcgtacaccgaaagtcgaactggcgaatatttcggtgtgttgaccgcgtttttttgttctaaaggtgttaacgccgtgcgccgcttcttaaataggctaaagtcaatttcaagtccacttaagaacagcaggacgatgacgccaatcgttgagagttgtgagataaggtcagaggtgttcacaaagttaaacacgctggggccaattacgataccgacaatgatttccatgacggccgttggcaaactgttgattttgaatttagccatgataagcggaattaataatgcggctaataaaataatgactaaggaaacttgatccatgaataaatacctcgattcgttttagtacacacggagctgatcatcatcaaagccccagaaagcttcgctagcatgtgcatcggtgaaaactttcaggatttggtcgacaccaggggctaatttgtcaggcgtcagttggctcaatggttgccaactaatggccccctcgtatgagccggctagcaaatcaccgtgatagtgactagtggtgtataaggtaccaagcgacacgtcgccgtccgcattttcgacccacgttacggtgccaactaattttaattgatcgacgtgcaagccggtttcttctaatacttcacgcttcatcgcggttacttgtgattcaccgcgatcaacatggccgccaggaaaagttaaccccgaccactgtgcgtcaatcttattttcaaccaggacatcgccggtcgctggattggtgataaggcacatgttgacgagttctgcacggacggtccggtcgtggtgttcatgctgatccttagtggctaaccagtcttgggccttgtcattgatgcttgccatgaatgctgctttcatttgtaggtaggctgcgagatcggcttgtccattgcgcacacctttttcgcgaatggcagtatacttgcggccgtctgtccggtgcgcattgagataatcccggaaagtgagcaattgctgataatgctgttcatcagttgtaatgatcacgtggatgtcgttagcagctaattgcgtcgcgtaagtatgcgtcgttccagcgaccggtcgtgcgtgtaacgtagctacggcagccgcctgatctttaacaagcaacgccaagtcaattgttggacgcgctaataattggggcatggccgtactacccacgtgactactttttaatagattcgcctgtaattgctggcgtaacaaggtttgatactcggttgcttgcttttgccagtcagattgataggcagttaattgaattggttgcatagaatccctccactcgaataagtcattgaaaggatacactttttgagtggttttgaaaaggaaagacatgcctttcaaagcgagaagcaataaaaaaacacgattgcagatcaaccgtgttgtgtgtggcgcttatttgagattgagtgttgtccgttgtcgccaggtcttaatcagcgcaaccactgtggctggaatgagcgcggcggccataattcctagaaaacaaagcgagaggtggttttgtacgaagctgatcgagccaaagaagtaaccgagtgaacagccgacactgacccagataccaacgccaactaagttccagatagcgaaggtcggttgcggcattttagcggccccggcactcagcgggacaaaggtccgcacgagtggaacaaagcggccaaacatgacagctttcgcgccatacttagcaaaaaattgttgtgcgcgttgttgcttggattgggggaggtggcattgcaaccacggtaagcgaatcagatggcggccaatttcgaaattgacagtgtcgccaattacagcagccacaaagaatactggcaccagaatctgaatactgagggcgtcgctgtgagttgcagccatcgtgctggtgagaaagatcaatgattcgccgggaagaaatgggaaaacaaccatgcccgtttcaagaaagataacggcgaataataagatgtaagaccaactaccaagcgtagttaatagtgggacgatactttgttctaaatgggttaaaatggctattaaattgaccaacggcgccacctccaatttaagttgcatttattataagcgtctgcgggttgaaaaacagatgtaaccgattacatttcttccagtttaacacaatcgtaactttgatagaccaatgttcaaacaaatttacataaaaaatcaaaaactggcggctgccatgggttattaattgagtcgggccgccgatagtgataaaattattgttcgatatttaggaatggagggcgttcaatggctaagtcaattaaagctgcagaacaggaacacttagatcatgtggttgcgaaaattaaggtggctgaagagcaacaaagccaaaccattacgcgctcggaaaaagatcaggccgatattaaacgtgacttgctgaataacatcaatataaaaacggatagttacgaaggcatgatggagaccggattatccgtgcggcagcaacaacagatgatggatgagcggcagaatagttggaagcacgcgactaagcaattatcgacgttaaaaaagttggaaaagaatgcttattttgcgcggatcgattttcatgagactggtgagcctaagcctgagacgatttatatcggactcagttcattttctgacacgccggatcactttttgatctacgactggcgagcgcctatttccagtatttattatgacggtgggttagggcacgtgacgtaccagactccggatggtgaacagaccgttaatgtgaagttgaagcggcagttgatggttgagaatggccagatcgtgacagtctacgatactgatgaagccgttggtgactcgatgttactagaagtgttggatgaaaagtccgatgtgaagatgaagagtatcgtgacgacgattcaaaaggaacaaaataccattattcgggatacgagttctgacctcctgtttgtgcagggggcggccggttccgggaagacctcgtccgttttacaacgggtcgcatacttgttgtatcgttaccggggtaatttgacggccggacaagtcatcttgttctcaccaaatcaactctttaatgattatattaaccaagtattgcccgaactgggtgaacaaaacatggttcagatgacttatttccaatacgcatcgtaccggttaccacacatgcaagttgaaactttacagcagcggtttgaaactgaaaatacaccgcagatggcaaagattacgaagttggaaggtagcctcgcatttttcaacgcggttacaacgtatggccgacatttggaacaagcggacatgcgtttccgtaacattacgttgaacgatgaagtgattatttcccgggaaaagattaaatcgatttactactctttcaacgaaaactaccacttagcgaaccggttatcagcaactaaggaagaattaatcaagattttgaatcgcaaggttgaatcggagatgcgttccaagtgggtcgaagaagcggttcaagacttatcacgcgaagagatcaatcaattatatggcaatcagccgcgggaatttaagaatggcgataaagagtttaaattcttagcacgtaaaattgtgatgcaacgcttaggaaaagcccggacgcaaatcgtgcgtaaccgtttcttgagcatcaacatgcagtacgcgcatttcttacgcgaagtaccgaagatcatcaagttggctgatcacggtatctcagctgctgactgggatgctacggttgaacggaaactagccgagattaaggaacgtcatatctcgttaacaacggtctcagcttacatgtacctgcatgacttaatgaccggaaagcacgggcagcgtgacatccggtttgtcttcttggatgagattcaagattacaacgcctttcagctagcgttcctgaagtttagcttccctcaagcccgcttcacaatgctcggtgacttgaaccaggcgatttttaccaaggaaaacagccattcgctgatcaatgaattggccacattatttgaccctgaaaagacgcgggtcgtgcaattgactaaatcgtaccggtcaacgcaacagattactgatttcaccaaggaaattttagtcaatggtgaagccgtcacggcttttgatcgtcagggcgacttgccaaatgtcgttgtgacgcctaactttgaagcaggggttgatcaagtcgttgatcagctagcgatgaacgattctgaacgtgatacgacggcaattatcgggaaatccttagcagaatgcgaggcgctcacgaaggccctgaaagctcgtggtgagcaggtcacgttgattcaaactgaaaatcaacgcttggctcctggtgtcattgtagtcccgtctttcttagcaaaagggttggagtttgacgcggtcatcgtgtggaacgctaatcaggaaaattaccaacgtgaagatgaacggcaactattatatacaatctgttcacgggccatgcacgagctaacgctagtcgcggtgggtagcttgtcaccgttactagcgcgggtgaaccacgccttgtatacattaaatgaagcaaaagtttaagtcagtttaagacagtgagtaccgctccattcacctggagtggtactttttttagttttacttgtgaaggaaatcttaaggtgcgtcaggatgatcagtagtggaacagttgggacttgtgtcggaataactaagaaaacgctatcataacgatggaataagcgttaaaattaactcatcaagtgcagtagtcggtgagagacaatgaccttaatactgactaggcacataatatcgtgaaaatactaacaactagttagaacggttgttagtgacctgaggaggaaacgacgatgtcaatcactgaaatgttaggtattcaatatcccattttttctggtgccatgatgcgaattgcgacccatgaattagtcggggcggtttcggaagctgggggactcggtgttttaggttcagcggggttatctgccgaacagttgcgagcagagatccaagcgacccgcaagctgacggataagccgtttggtgtcaatttaatgttacagatgaagaactgtccagaactggcccaagtcatcattgatgagggggtcaaggtcgtgacgactggtgcgggtaacccgacttcatatattccgccgctacacgcggccggtattaaagtgattccagtgattgcttcggttcaccatgcccataagatggtggcggccggtgcggatgcggtggttgctgaaggtcaagaatcaggcggacatatcggtcaaacgtcaacgatggcattattacctcaagtcgtggacgctgttgatattccggtgattggtgctggcggtgtcggtgatggccgctcgattgcggcgatgtttgcgctggccgcccagggtgtgcagtgcggtacgatctttctgacagctgaggagtgcccagttccagctagttataagcaacgggtattggctgccagtgacacggatacaatcgtgactggccgcagccagcgcgatccggtacgggcgctagttaacccgatgttggcacaatacttgcgattggagcaaactaacgcgccggtagcggaattacacgcgttagcggacggttcatttgcgaaagccgttgaagatggcgatatggaacatggtacgcctatggccggtgaagtggcagggatgatgacgacaattcggccagtcaaggaaattattacgacgttgtttggtcaggctcgtgaggtcgcggcacaactgaaaatcgaataagatacagtagcatagctcggtactaggtcagcgttaactagtatcgagctattaatggttattggctaccaattaggaatccggttaatttgaattttaatcagcgtttgataagggtttcatgttataatcaacccattaatttagtaatggtggcagacagaaatcatggaagatcagatgaactattatcgcttctcacgtgaacagtggaagcaattttatcgtaacaatcagcatcaagtaccattgaccgcagccaatttgcacgaaattgaggcgtttaatgaccggattagtctcgacgatgtccgtgatatttatatgccgtttgcgcatttgttgcaggccaagtatgaacactacttgtcatggcgggaaacggagtccgtttttttacaccgtcagaaccgccaatcaccctttattattggagtgtctggaagtgtggcagttggcaagaccaccacagcacggttattagagattctatttaaatatttatatccagaccggcggacgcaattgattacgacggatggtttcttatacccgaatgccgagctcaaaaagatgcaattgatggaacgcaaagggtttccggaaagctatgatatgacgcggctgatccaattcttgaacgatgtgaagagcggaaagccgttagcgaaggccccggtatactctcatcagacttatgatattgtgccaaaccgttttgacgtgatcacgcatcctgatattttgattattgaaggaatcaacgtgttgcaattgccaagcaatcaggcgatctacattagtgattttacggacttctcagtgtatgtggatgcggatgccgatttaattgaagattggtacttagaacgcttcaaggccctgatgaaaacggctttccaggatccgacgaattatttctatccttgggcgatcggtgatccgaaggacgcaatggcgatggccgagcgtgtttgggaagaggttaacttgaaaaacttgaatgattatatcttgccaacccgtaatcgtgcggatttaattttgcacaaagttgcgcatcatgtgattgatgccgtgtatttccgcaaatattagcacctaagaaatttctcatactggttgaccgaacgtttagaaatcagtatgatagacctattgagcattaattaatccaaaggagtgaacaacttggcaaaaacggataccgcgtctttcgattccattttggtattggatttcggtagtcagtataatcaattgattacccggcgcattcgtgatttcggcgtttattcggaactacttccgaacacgatcaccgctgaagaaatcaaggcccgtcacccgaaaggtattatcttttctggtggccccaacagtgtttacgatgatggcgcctttcgggttgacccggagattttcaagttgggcttaccaatcttggggatttgttacggcatgcaactgatgacctacacgcttgcgggcgggaaggtcgaatcagctgataaccgtgaatacggcaaggcgaacattgacgtgacgagtgactcggcgaccctatttaagaacacgccagctgagcagtcagtgtggatgagtcatggtgacttggttactcaggcacctgatggttttgacgtggtggccacttctaagaactgcccgattgcggcaattcaagatgttgaccggaagttatatgggattcaattccatgctgaagttcggaatacggactacggtaatgatattctacggcactttgcatttgacgtttgccaagctgaagctaactggtcaatggatgatttcattgatatgcagattgaaaagatccgcgctgaagttggcgacaaaaaggtcttactgggactttccggtggggttgattccagtgtcgtcggtgtgttattgcacaaggccattggcacgcaattaaccagtattttcgttgaccatggtttgttacggaagggcgaagctgatcaagttatggcgagcctagaaggtaagttcggcttgaacatcatcaaagttgatgctaaggaccgcttcttaagcaagttggctggtgtcagtgatcctgaacggaaacgtaagattattggtaacgaatttatccaagtgtttgatgaagaagccacgaagttaaacgggatggaattcctcgcacaggggaccctctacaccgatgtgattgaaagtgggacttcaacggcccaaacaatcaagtcacatcataatgttggtggtttgccagaagacatgcagttcaagttgattgaaccgctacggacgttatttaaggacgaagcacgggaactcggtgaaaagctagggatgccgtctgaccttgtttggcgtcaaccattccccggccctggtctcggaattcgggttattggtgagattacggaagataagttagaaattgtgcgcgatagtgactttatcttacgtgatgaaatcaaaaaagccggcttggaccgtgaaatctggcaatacttcaccgtattaccaggcatcaagtcagtcggtgtcatgggtgacggccggacctacgattacaccgttggtattcgggccgtgacatcaatcgacggtatgaccgccgactttgcacgtattccatgggatgtcttacaaaagatctcagtgcggatcgtcaatgaagtcgatcacgttaaccgcatcgtgtacgatgttacgagtaagccaccttcgacaattgaatgggaatagaaaatcatataaaaatgaaatcgtaatattgatttaacagtatttgtgagcttataaaatggatgaattggtggcgaatctgaaagatttcctatcaacagtctcactaagaatcgtggaggtctttagtcacttaggagtgattaaggatttgcacgattctttttttattggattcttgtttgttcacaaaacattgcggataatgtaagtaagtagagatatatcatatagagtgtggaagaactgttatggcaattacagaagtttaagactaaatctaattgataattgatgaaccaaatcacaaagagtttgttagcacttttgaagagtgaatcaaagagaacccagaaaataatttctaagttatgaaagtggtaatgatttttacaaagaattgaatgaagcttattaaaaaacaaacttttatttaagcgtactaattcagatttaatgcaggcgtaatatcgatggtgtaataggattatgaatggtttgttttcagaagttagtgcaatcaaggttaaattctgagtgataattttattttttatcattagtaggacattttttagtaggacattttttgacatttgtgactagtgatattgcagtgcacgatacaaaggtgatagtgtagttagtatagaatagtgagtgaaaaggagtgaggaggggtcatgagtaattatctagtgggtcctgataagaaaaatctgtttggtcggcggtcaacgtgggattttgatcaggcaattgaagcgtccagtgatggagatgtcattgagattgaggcgggatttgatccgttcaacggtcaaaataaccaatctatagttattactaaaagtattacaattcagggtcacgttgaaaatagagagaatgaacatatctataccaatacaatcgatggtattgtagtgaaggatggagctacagtaacgttgcaaaatatttgtattcagaaaaatactgataagagtaatgcaattactgtgcgtatgggttcaactgtaattgctgaagatgtttacttaattaacaaatcaacgactggaacaaactatccaattgtgtatattagtggaaattcacatgtacaattaaagaatgtaacagtcggagctagcaaaatttcagatggaaagcatcgtatttacgtcgagaattctgagctgactattcgtaattcatggatttgtgcaaaggtgtatttgaagcatgctcaatttttatgtcataaaagtcaactagaatacacggacggttgtgtgcttaacggaaatgaacaaagtactatccaattaatatcgtcaactttaacgggtggaaaaattctgtctaaagaagtgtatccatgcgttcatatatgtgattccaaattaacctgtcaagattgttctattaatcagcccaagtttgacatggctctattggtgttaaacagtcaaatgacacttaaaggtggtcaagtggattcagttagtttagatcacaccacggctaatattaacgaaacactgattcgggaaagctttgcaatcaaaaatggaacacaagtcactggaaatcgcttttttattctagggcgtgacaacggcaaagtaaatttgtatattgcgggccgctctaatattcaggtctgccatattatttttggacaaatctcaaatccaaatttgaaacttgaacggaatgtagatatcggtaagacagcattagattactaccaatataatttaaacaatgggacgtttgtggtggatcaaacaaatcattacatttccgcggacaagcagggtcaagtgagttattttggtaaaaagcctgcgttggatcgtctcaatgaaatgatagggattagtggagttaaatcggagattaatgaatttattgctatagcccaaatgaataagcagcgtaaggagcaagggataagtagtgatgccatgacactacattcactattcctaggtaatccggggacaggaaaaacaaccgttgcacgtattttaggtgaaattttatttgacaaaggaatcattaacgatcagaaatttgtcgaggtttcacgttcggacattgtaggacgttatattggcgaaactgcgataaaaactcgtaaagttctagagtctgctcttggcggagtcctatttattgatgaggcatatacgctagctaacggggatgagaaagactttggacggaagccatcgatgagattttaaaattcatagaggatcatcgtgcggatgttgttgttattttcgctgggtataccgatcgtatggaaaagttcttaaaaatgaatgagggactgcgaagccggattcctaatcactttatgtttgaagattatacaccccaggaattaattgaaattggctggaatgacttaaaggctaaaaattatattgtggataaaactgcatacacggacttagttatgcataattttaatgtctctcacgatcatagtaatggccgctgggttcgtaatcttaatgaaaggttaatcaggaaatttgctgttcgtgtcgccggccagcaaggagaagacctttctgcaattaagcagcaggatattgatgctgcaatgttatagtgacaacagaggagtagtgaagaatgacagaaaagaaacagtatgttcggccgcccaagccagtaaagataaagcctacggtatctaggaaaaaacttagccataaattagacgcatataattatttacatcccgattattggaagcgaaagttagctcacttattactagtaataccagttgtgtggaccatttatggtatgattctactggccatcttttatccaggtatgcaatcaggaattggagttactgttagcttattaggagtaacgatgagtgtattgcatattgttctgacggcaataagtgcttatttctatccatttagtttgtactggtatcgtgaaagtttgataggacgcattttaaatggcatgtggtactttggtggcttctgggttgttattggaaaaattattgtcacactgattggtggcattttgattgcaggtcttttggcaccgattgctggaccaataacattacgtcgttgccgacgaaaaaatataatcattggtgacgcaaaagattttgaatagaatattattaataataagtaagtggatctagaacctgttgcagtgctatgatccctttatggttgtcagatgaaataatataattcatctgacaaccatggagggattttttatatgccaaggtctagacatacaccggccgaaaaattggctttaattactgattttcagagctctggcctttctattagcgcatttagcaagcaacatgaattgagttgttattccattagataatgggatgttatgctatcaacgtgacggtattgatggactagcagaggccactaagaatcagcactacagtcagactttcaagcagaagatcattcgagcatatttgaatggcgagggaacaattcaaggattaactaataaatatggattacgttcaacttcacagctaagaaactggccaatcaagtataatagggacaaactgtgacggcttcaccgtctagaaagcaggtcctaaaatgagccgtaaaacgacttttaatgagcgagtaacgattttggaatggattaataaaggtaatcattcatacagtgaggccgccgaacatttcaacgtttcttatcagcaagcccgttattgggccttaaaggaccaagctaaaggttttgaagttttggtcgataaccgaggacatcgtaaacccgaatcagaattaaccgatttggacaaagccaatctgtggattagacaattagaatcacaaagcaaggatcagcagttattagaggctttcataaaaaaatatcaggaactttagcgcaagggtgaattcacaacgtcgactggcttaccatgcaatcaaggaagttagtcaaaataatcacggtacggtcactaagttattatcaatactcaaagttagccgccaggcatattataaggggctccatcgtgacgtaacgacttgggaaattcgagataacttcttaactgaacgggttcaatactggtataaccaacatcatcaaagtattggcagctatctaatctcagaaaagacccgaccgttaccgaacaggtgacgttaaagcaagttaagcgaattatgatcaagcttggaattcgttgccaggttcgtcagaaaaagcattcacggatcaaacaacaggagcaatacttacaagataatgttttaaatcagcattttagcgttaaccaaccaaatcaggtctggttggccgattcaactgaattaatttatggtgttaatggtcagtataaagtacgcctgagtggctactgggtctttgcggtcggcatctaattgcccataaactaagtgaaactgaaactacgaatgcggaagttcaggtttttcaacgggcctttaattttgcgggtgacgtccaccctgtagtgcatactgaccgaggttcggcatacatatcaggagtattcaataatttttggcgcaacatgaggtactcgtagcatgtcacgaccaggaacgccatatgataacgcaccaatggaacgatttcaaattacgttggatggaccgacatgccaaaccagctacctataaagaattagtggccttggttgaagaaggcagcaactactttaatcagctagaccgttcatcagcaagaaacgacctcaccccagcggaatactggaatgaggccgtttaagtagagcaaaacttatattatttcaaatgacaacttgacagatactcgtacagtaggaactccaatgaaagaggttttcgtcttggtgtttttattttgtaaaaatactagtggctaacttgattttaaaactcaccatcaatgttccgtctcatttcaatgaattttttatatctaggatattgaatgtgatgaaaatctagctcaggcataatattgattagggaactgtcgtgaaaatgcgtgttattcaatagccattctatctttctgtaacattcagcaactacttcatcattactacattccataaaaatcactgaagtgacaaaaatatcgtcaatattatcttcagtttttttcaaattaaagaaataacgctttaatgaattaggattccagtttcgtttcctattgaggattctaaagtatcaaacgtaacctgtttgaaggtctcaggtttcttcataaacttctgtattgtcttaatgggaggtttcaagagtgctttagaaacttctgtatagtcagagttccaagtacttatttcaaaaaagtttccaatcaatctttttactagagaacgtagcacgtcaaattcagatacgttttgagaaatgttaaaaaatggagtcagcggccaccggaatattggctgaaataaaaatctgccgtgtgcaatcgcatttctaagtttaattactgattcaacgaaatacatatcattttctgaatctataccattttttgatagtaaatattttatttttgtgctaaagttagggctctttgcgcctagagctgttgatacaatcttatatttatcgttaacatagttatcaagttcgtcattccttgttagcataagtgaagcatattctttcaaacttgactttattttgctttccgcaattttctttaattcatcttcgcggctgttactcaatagttctaaaatttgaaagagtccaagtaaagcttcatcacgatataaattgctttctaaatcctcattctctaggttgagatttttgcgccatcggtcgagtagagaaatagaaaggtttttatactttgaatcattgattttaaataatactttttctaaatcttttgaatagtcattcatttcggtttgaaaaatagtttttgggggattgtcgataccatttttaaccacgaaagaggatcctgattcagtaatgtcataaatagtgatgggacattcaagaaatagagaaattatcccttgaatgacaagtaaccatggtctcattagtcttgaagtttctacttgtgaataaattgggtctatattcaattcaccacgaactgcaattacagtgcttttatcacgactaattgattcaactgttataccattgaagctaaaatatattttgatattacttaaatcgtaagtattactgtcgacagagtgaactgtaaaaaagtgagttttcaaaatgttttcatcttctctcaagttttagtaagcatacatttttcttgcttttatacatacatcatatcaataaaaattttatttaaaattttttcaagcattgtcagaatttatgatagttgaaggattgattcagcttaaacgctggctgacaagtgtacttatcggcatttatcgcaagtatgtcaaatcagaattaaatagcatatcgaatccatccggtaaggatagttattctatattcatcagttaacgttccacgggcgtttctaagagcagtagcgataaacccggtgatagtagtcgctatgaactttgaagtgttaacaaattgttggtaactttgttagccaacgggcattcgaatgtcagtattgagaaatgtgtgcatagcactgagtaaatttggtttgctttgcaattgcaaaagacttgtcagaattcgttaattgtaacggccttttataaatggtttgcacaattggaacgtacgttctttttgggcctgaataaaagcccagttaagggctgatattactaactgattgcagattagactatgcttgtggttgactaaaatactttaatgaagctaaatataaagatccaccaataattgcgagaattccgccaatccaacccaagaatggaataagcgcgattgcgccgccgacaattagtaaaacgcctgatgcagtaccgacacgcttatcacctttataataaattaatgcaataattcctaatgctaaaatagcaattttcaaaatgtttaggaaagcggccgcacctgatgtattagatactgatccagtggcagcatcgctaacaatgccaccagcaataaaccagcccccgaataataaaataatgccgccgactagccctacaatcccgttagtaagtgctaaattttttgacttcatgttgaagctcctccctttattaacagcttttcgtgtcgatcagtttattggacataagttgttgaagcctacccaaaccattaatccccgtattgataggcttatttttcgtataaataaacaaaggtgaccaatattctggccgataaataagctttccataagcgtgcccgaagtaacttggttcgaacattaagatacttcatcgtaaggggcgttagtcgcgtttagccctattcccagaagatgacggccattgctactcgtacttgttggcgttcttcttccgtaagtgcttcgcctccgtatgtcatcgaatccacatgagctgtgagaaagtcttttaagtcagtggtatcttttctagcaatccatttagatgcgctatcttcacccagcaggtagtcggttgtcacatcatatagatctgcaatctgtttaagcatgttcaaatctggctcattcgtgccatattcatagttggcatatcgctgcatactgctcaaccctaatttcctggccacctcagtttttgaccagttccgactgtcacgaaggttaattagtcttcgaatgaagttgttttgtgtttttgctggcatgttatagtttcccaatgaacgtattgtataatatttaaacgtaaaatttatatttttaaataaaaaatttaataaatagcttatttaaataaaaaatttaataaatagcttatttaaataaactatttaatataaaacatgatttatcgatataaattaatcgcttgttaattataatgcattcaggttgttggaacaaaatagattagggcccgtctgaaaactatttaatccaagttaaaatagcggtcatgtatatcgcttccaagaagacatgcgccaatttatcataacgcgtggcgatacgtcgataattcttgagctggttaaaataattttcaatcaaatggcgttcgcaataaacataatagtcacacggccatggctgctgggcattacttttcggcggaattgtataatggccgctttcggcttcaatatattgacgtaacgcagttgttccgtaagctttatcagcgatcacattaaccccagctagatccagctggtttaacaaggattgggcagcctgactatcatgaacttgcccgccagttagtataaagcgtaacgggttgcctaaaccgtcaaccacggcatgaattttggtcgttcgaccaccacggcttaaaccgatggcttggttttcgacgaggcagcgggcatttttttagcaccagtggctttttgatgtacgcgaatactggtagaatctaaactcacattttctaggtctggatcgtcaatcagctgccgaaacagcttttcaaataacccggcatctgcccaaactcgaaaccgactataaacggttttccaagatccataacgttccggtaaatctcgccaagcagcaccactttttaggatccagaggatcgcattaaaagcttgttgattggataatttaggcggtcgtccagtgcaatatggtggaaaaagtgattcaatccgttgccactgctcgtcagttatttcatagcgtttggggattgtcatgccaagacctcaattcgtttttatccagattataccggattagcttgttttaagacagaccctagtatcaagtgttatctagatgatggttttatttctaggatgctactagatttagatacgatttttctcactttaatatatacggagataatgatttgagaattagtatgatttggaatatcggcagagttctccaaacagataaataattaaaaataggtggttagacttaaaacgatcactgttttccgatgattgtagtttcttaagatagactggtcaaatagtgcaatcataatttcactctgaagaggtgattgttcacaatcaaatggtcttcattatggtattatgacaaggacactagtggatgtttagtcagcttggcggactaatcccaaaacgagctgaaaagctgatgcaaacacataaggaggttggaaaattttgaagtcgaatcgttctattgtcacctggctcctcaatatcgttaaactaattggtctattcgcactatatcaactcgctatgattcctacgatgatgccagcaattcgacacgggttctcggccacggcaacactaattgccggagtggcaagtttagtcttgctcggattactcatttggtggctggtaacgatttatcgtcgtcaagcgccaatcgtgaccagtttatcacgaccgacacgtccggtgttaacgatagtgggcctatttatcctggttgagttaggtaacgtgttggcgggacttatcgtgaaacaaccccctgaaaaccaagtgattttggataaggtatttactactagtccagtcattaatgttgtcatgatggcagtactggcaccgattgtcgaagaactgatttttcgtgggctgatgtatcgttggttatttccgcgggtcacaaattgggtgagtttcacggttgcattagtttttgcgagtttagtatttgcccttgcccatacgttatcatttagccctgcgctactagcctacttaccgatcgccgtcgtgctgacttttacgtacgtgtggttcaacgatattcgctatagtgtcaccttgcacattatcaataattcattagccatggttggcatgttgactttgctttcacgttaacacaggttatcctaccgacatagcggttgacattcgcgtattagtcgcgtgatgtgtaatgattaaaacaggcaacgtccaaattttgggcgctgcctgttttattaatagcggtgtggttgatgtagtggtaatcattgtttggtcacttaataatattaaacagttcagttataccaagaatattattatgatacaattttcgatggaggtggcgagatgcgtacaattacaccaattgagaacagtcggcgacatgaagaattttgtccattggatacaaccttgagtatcttgtcgggtaaatggaaatcaattattatctgtcgattaatggggagttcgcagcgcttttcgtccttattaaaaggcatgccgggctgtaccagtcgaatgttagcgatgcaactaaaggaattagttgcggatcagattgtgagtcaacaaacggtcgctaatcattcagtttatgagttaacgaacattggagtatcactagttccaatcgttaaagcaatggatcgatgggggaaggcttaccttgaaacgttacagttggcgtagtcgattggtcaatgcttagactaagtataggacgtcattattagccactatttttaacaatcataaaaactgctcgcaggaatcttcgggatatactcctctttgggtagacaagcaaataatcaaagcttgtctacctaaggaggagttttgattaccagtgttactaatactttttctaagaagtattagtaaatttatggggattaatgcggattttctttttagttttagtacccgagcgcaattggtaaatttaaatcgtgctttgaaatttgcacatcctgttgctgctgttcatccaactgcttactcgacgttatattcttgttttgcccatttgggtggcgatggcatgttactcgcattgataattgtcgtgctcatcataggaaaaaatcaacatttgaaaaggttattgacttggtcgttcataccgacgttttttaacttctcagagccagtgatggttggctttccaatcatgtatatgcctatttatctaattccttttatagtgagtcctttagtaacgacagtcattgcttatccgtttttaaagtacaatattgtcccagcgcctgtttatccagtgcctaatggtacgccaggactgttgaaagcttttattgccactgggggcaacattccgaccctactattagcacttctttgcttagttgtctcttgttttatatatttaccgtttgttaaagcagagatgagactaattaatctagagcatgcgaaaattagatcttcttttaaaagataaattttgaatttgtgagtctagaggataatagacggagtgattaacttgcgaatctcaaaaaaaattattatttcaataggcctattatgcttccttatgacgttaatttttttgtccgataaatggactaaacagaatatttcaaatttgaagattcaacgaaactcagttactgaacccatagttttggttccaggaagtaatgcgacacaatatagatttgatccgcttataagagacattaataaaagggaaaaaacacctcattctttgttaagagtgttagtgcataagaattatacaatttcctatagtggtgcaataaaaaaaggtgaaagacaaccctttattgttattgcttttgaagataataaagatggttttaaaaatataaagaaacaagctatctggttaaaatacgccttaaaatatatatcacaacaatatgaatttcgaaagatttcattaattgcccattcgaatggtgggctgattatcacgtatgcacttgaacataatttgactagccattatctaactgtacaaaaggttatgactattgctgcaccgtacaatttgaacgattcttctgttagaagtgagactgagttgttagaaaacttgattgcaaacagaaaatatattccaaactcaattgatatgtattctttagctggcactcaaagttatagcaatgacggcttagttccgttgtacagcgtattggcgggtcgctatatttaccaaaagcaagttaagcattatacgcaaataactgtttcgggtgttggagcggaacatttggacttaccacagaaccaacaaataataatggccattgaacaatatattgaaaagtagaaattttttctgctttttcctttaattacttatcctaatttatattctgaaatagttcggatattatctgttttatgttattttaaaaaaagtacaagtgcagttctagtcaataattcatatcttgcaagaaggtaagcagatgaataagcataacttctcaaataaacgtagctatgcaaaagcttacagacagtgcatgcgggaagatattctaggtcaatatgcggtagctacgttttggtatctgtattaaaagaaaataccatgatgtgtgatacgtgcgatacacgttttacatggatccttttgaacgagaaagaatgattgttgttcctaatactttcaaagaaattgacagaagggtgacttttgcagacccgttaaaattttcagaccatactaaaggggcacagatggacactgaagggtatggtatttaaagaagtgaattggaaaaattgaggggattgaatttatagactgtcattttagaatgaggcgcatggctacagttgctggcagcaaaactgtcaaattggtttcgggctgtattaaaagaataccgttaaccagttctactaagaaatttacaggacacatggtggagcctacaggagtggttgaagtggtcatgaattagctggtgcccacaaatatagggctcaacaaacctgacaaaactgtcaaatttcgcgtgttaacgtgagcaacagacataagaaggtctgatttgccttgagcacgtcggcagcattcggtggaattaactcatcacttatgctggggctagcataaaaagagtagcgttcatcttcttgatttgaacgctactctattattttaaatgccgaactgtttaaaccaaagagggtaaataatgaatttgaatatttatgatctactactatattgatatctttttctacttttgacatcgattgaaagtgcgaagtttaaaaaaattatatatccaggcgacgtaatcaggattagcgtttttaatttaaaaaaattgggtagattctttttagcagagtgtgaaattaagaaagataatcaaatctgttccagaatcaaacttagttgtaccaataaacaatagttgttttgtattaatttttgggttgaaagagtgatgtaattaaacttgtatcaagatcagaaatagatatgctttgagtatttaagacacgccataaaccaccagcacaaaaattaaaaaaattgaattgctgggttgaagtgagatgttgccaatcagaattttcggttaagttgacaatgtccaacagtttgagtgcagttaaccgatgtaatgtgtatgagaaaaagtcggaattttgtaaaacttgtaatcgatttttgttgccaagccaaaatttgaaaagagcgtcgataaaatcatttaaacaaagtattggtgtttctttcaatatttcgataaagtcatttgcagaattatccaaaaagccctcaatgactttttgtgtggatgaataatgacgataaaaagtttttctagatactcctgactttaagcaaagttctgtgacagtaatactttcaagtgcttgtccagtctcaattaaatcaaatagctgttttaccaatttagcatcagttagttgatattgttcttgtggcatttgctttatctcctttcatctttcatcaaaatctttttggaaagataaattatcatttattgaattaaatagtggcaaatcagggatatgctggacacaccacctgatttaaccactattcatgttttaaattcgtcttttctgggttcaggaggtttaaagaagccgtacgtcttatgctaagctgtctttttttcgtttcttaatgagggtagatgcatacatggcaaaaattgaagctataccaatgtacagcaagctcaacattgaaggtccagtgattaatgcatctgtaatatacatttggttaagaataagatcataggcaaagcgaattggcgtaatatcataaacataattatgatagaagggactcagcatttgcggaatgaaagtaatgactgccattgaacctatccagataataagtagtaatggccatccttttagtccaagcaaatcgagtacagctgactgcagtagatagaaaacaaatgatataccaccaatcatcagtaggaattgttttggatcatgaattggcacagaatagcaaacttttgtgaagaagtaaactgatacagcaatcgcagtgacaattgcgatacccgaaattaattgacttgtgacactagttaatgagaggcggccatcagtacgtttcttctcattcttactatggtctcgccagttcagtaaactagcaataagactaccgagccaacagaagatggttactaagaatggcgccataccacttatttctttagttgaaactttattgcgtttgataagagttgtgtgaattggtgtttgcaatttagaccagtcctgaggagatagtgttagtcctgacttatttgcaacggttatatattcgttagaaatcttctgatttagatgatcagtcatctttggaagtgcagtagtcaaaatagttgcaaccgtcatattacttccttgactgacgtataaagagatttttgcttgttcgggggtcttcttggttaatgaatttgctaaggctttttgttgttggaatggggccgtcttagcagccattggcgttttaactaccagggcagctagcttctgagttatgattttaccttttaaatagtctgtttgctgattgatagctttagtaaatcccgaatgaatgacaacagccccgtagtattttccggatgcaaagcctttagtgagttcactcgtgtgggttacattgacccatttaatttcagcgcttttcttatggctctctttccgtaatttcttaacaacattcttagcatcttttcctttatcgtttactactaacgctaatggtaaatgacgaaccttaactgtgctcctagctccaacttgtgcgaaggcaaataatccgattaatatagtggcgactaacatgctgatccagatgctttttctcttaaacacgttgaacattttcactacccccttttttatgctacgggtagtttatattaattttgaaatgaaaaacatggtcaaattaatatgatttgtgtcttaaggctacaaatggcagccatatgagccataaggttacagaattggcaaaactggtaatggaggaatcgatatgacggattttagaatgaaaaaaactgacgacgttatcatcaaatcatttgttgacctagtcatagagaatggatttgacaacgttactgtcaaggatattgcactcaaatctatgattagtcgtaaaactttctatttacattatgaggacaaatttgcactgacagacgcaatactacaagatattctaacgtggcttgatgagacattgaaaaagaagcgattactcataaatcaaggaattggcttaagtaacgcagttggtcaattagaaccggaacttagacaattactgatgtgttggagcagaccaataaacgcaataatgacaattccacaagctaagatgcaactaatggatgatcttaaagatattttaagtaatcatttacaggcagctctcacacatacaaagtcagatttggaaataaatgttattggtggcatgatgttagggatgataagatattacttacaaacaaatgacttcccatcaagcaaagaaattcatcaattatcagacacccttaatttgatatttggcgcgtagtataagtcagtcacatttctgtccatttaaagtggtattttgctttagtgattaagcctgattgtgaaatcttatagcgttttttattgggattaatttggcgcctaaattatgactatacgatgttgtacaattgctttattagtataaacttcatattgtaagggtcgtcgtagatagaaaaggcattttatttggcgttattagttatagcgccagtaaaaaaacaaaactggaatttaactaatttcgataaaacggcgtctcactggcaatggtcggaaagttaaacagtgagaattcactggattggtgcggccaatgagccacaaaccacggtgaaaaaacaagctttttagggtcaacagataaaggtatgacacggcgtatgctaaatgagggtcggtattgagttttattgtgagaaaatgcttgccgggtcttactcaatttgtcataccatagtatagttaaggacaaacgagttaacgggagtgacaatatggactgggaagactattttccaacggcaatcgctgaacgtgggtacgattattacttacaggggtatgtcactgatttaaagcggaccaaaacacaaattacggcaacggttacgggcacgcaggactatggcgtggtaatcactctcgctaatggtgactttcacgatggcgcgtgtgagtgtccgtatgccaatagtcatccgtattgtaagcacatggcggccgttttgtaccaagcgacggcggctgacaaacctgccagtcaacatccagtttccaaagcaccaactagttgcgacagtcttgaacagactgccactaagctggttgagcgggctactgatcggcaagtccgggactttttgagtgtggtgttggcccatgacaagcatctcgtccagctgttccggacggtcatgggtgagactaatgttgtgacagatttacctgaatatctcgcgagtgttgatgatttatttgacacaaacgcggatggcggtggctttatcgattatgacgcggcgacggatttcggtgatgaggccttaactttcctaaaagaagaggtgcagccgttggtcgatcacggcgagtatggtttggtatttcaaatcttagcgcatctgatgcttaaaatcgaccacgtcgacattgatgattccgatggtgagattatgatgatcatgagtgctagtgacgacttgtgggaagctgtcttaacaaaagccgacgcggatgtgcagcagcaggtgtttgattggttatgcaaacaattaacgaagtcgttgaatattattgaagatacgcttgacgatttattattcacatatttcaagacgccagcgtttattgatgcaaagctggtgtataccgctaagcggttccgtgcggtgcaaaaacacccggatctctgggactatgactggcagataaaaaaatggctaaagcactatttacaaatgatgtctgcggctcatgtgcctgataagcaaattattaaattttgtggcgctaacttggcgataccgcaagttcgcttgttttatagccagttctgtcttcaacatcaagatgaggcgcacgcggtccaattgctaaaggatggtaaaaagttggtcacggacgatcccagcatgttagcggaacttagtcgccaactaaaggacgcttatcagcaattaggtgaacagcaattgtatcgtcaggaattatggcaattgttgactgaatatgcgccagcggatgagatgctattttcagagttgaagcagagttacccgaccacggattggccggcgattcgcgagcaactgttgacggcgatcgcgaagaattccaatgtcgatttgaaaccactgtatgtgcaagaaaacttattgaacccgctattaaaagcggtcgtggccgcggacggactctgggatttacggacctatgagccgttattgaaaccacgtttttcagatctgctgttagcgaaatatgatcatgaagttcggaaaatggctactactactggaactcggcggaagtatcaacaattagttggcatattggaacggatgctcgcttacccggctggtaaatcgaccgtgcaggcgattgtacatgattggcagcaacaatatccgcggcgttcagcaatgatggatgagctctcgcggctaaactggtaattgatcgttagttggcgcagcaatcgcgaacagagttaagtcgcatcgctaagtttaggatcggttcctaccccaaacttagcggtgcttttttcatagccaactgcgggcataataaattgtctttgggccttggtcatcctggccaagataaaatggtaggacattagtttatttcaaagttattaatagctatccgtactcagggctgaccggtggctgtcattgaccctgttattcaaaataaggctaatcagtcatcgaatcacaattaagtttaaataatgaccgaattatcatcttggaaccggtataataagccttaagcgaccgaactgattaaccatagggtgtggatatgcgctgttggcgtcattcgtggtccggccgttgctacgaataaattagcgagtgatgtgaggacgtgatcagtaatgaatattttgattattggaacgggtaaattggggtatgaagtgtatcgtcgagtggccgtgatgccgcagcaccacgtgactttgttggatcatcaccggcatgagcatgatgtctcgttagccacgcagttaatcggggatgcgagcaatgttgatgatttaaaacgcgcgctgcgagggattgacgtcgtattctcaacggtgggcattacccacgcggcgcagtttgccacggcattggtgcaagcgatggatgcagttggggtcaaacggctattttggacgacccagtttcaaatcaactacgatcagatttcagaagcaatgtacaccttagcccgccgcgagtttgggtttagtcgtgaagttgagacgacctatgtggcggggcaaaaggccggggctgcagttatcaggaatagtgatttggactatacattgctagcctgtcattttttcaagtacaatgatgaagcggatcagttaattgttgaaccagctggaaatgctgttagcggtgggccacttagtctattctcattggcgacattgatcaccgatatgttggaacatccacaagattatccgcaacgtgagctcatgatctcagctcggccaggcgaaaagtaacatcagttctggctgattaacttgaattgacaacagtagtactcataaaatataagttttgatggcgatagctaagttgcaccaacaggtaactgggctatcgccatttttgtgctaagtttcaaaacttacgactgttaccagtgtactaatgtaaattggttctatttttctgagccagacggtacaatatttgtaaattcatcaaaagattgaggagatgggagcaatgtcacaatggcaacaagattgggcttaccaaaagtactgggtcatggcacactcacagcagcattataatgccatccgacaattagctcggcacaatgattggtcagctgcaaaacaggaacgctaccaacaattattagcagaagccgaacaaattacgccaactaaagccacgttgacaacggcttatcagcacgtctggggctattttaaaaagcggtgtacgctggccgagaagcaacgttacctgaatttactaacgaatttaaccccggcacacgatcagcttgggccgttcttgtggcagttaacggtgaagtacgaagtggcctatttgctggcgtcacgcttgctgcgtgcgtttgatcagcatgaaaatcaacggtgattcgtataacatttatattatttaaacaataataaatatgaaaaaacaatgaattttttacgattacttcgttcaggtctttacaaagttatgaataacctgctacaataataaaaaagttataattatcataataaaaacactaatcaaggaggcgaaataattatgattaaattgtttacgcaagcaggatgtaactcatcgcgaaaggcccgccaatggttccgggatcatgatattgcatttgaggagaagaactttagtagcgcagcccctactgttagtgagttaaaacaaattctgtgcctaactgagaatggattggaagatattatttctacccgttcacaaagttatcccgcaattgctgataagctgccagatatgtcattcaatgagacgctccggctgttatgcgaacaaccccagttgttgcggcggccaattattgttggtcgtaataaattgcaagtaggctttaatgatgatgatattcgccaattcattccccggcatattcggcgactgaattttcaacaaaccttagttggattggtggatatgtaatgataggggacttaaagtccaccatattgtgaaaatggtaattactaggttgatgtaaattaatgttaatccgacgctctttttcataattgttgatgccaatagcggcctaacttgattgaaagacgtcataaagaaacaaaaacatcccggctagcagacaggctagtcgggatgtttttggcgcttcagcagtcatttagtcgactgtgatggtagtggaagatgccattagctgtgccaactgttcttcggttgtccggttttgggacaacggtggcaagttgtcgagcgtaaagtaggctgtttgggcgacctcaatgttaggctcaaattggccatcagtaatttcacaagcaaagaccaatttataatactgaaatggttggggaatatcgacacgtagagcagtgtcaaaaacggtgatgagcccctgaaccgcgacgtgacggccagtctcttcccacacctcgcgttgcacattttcagtcggcgtgtagcccacgtcagcaaagccgcctggtaaggcccatagtttcgttttaatatcttgaacgagtagtagctgattaccatggcgtatcaagccgcggacgtcgattttgggggtgatgtagccggaatcctgagtcagagcagtcgttaagtcagcagttgatatgttggaagtggcggccatttgttgaatcaataaggtttgtaacttttgatagcgatctttgtcgaacgggtcagtcgtgtaggctaagccactttgaatcagagctaacattgcccgttgagtggttaatagtgaagatggcatgttaatgatcctcctctaaaggtaaataagtttatcaggtgcaatcttagtagctaggttatccggtagtggctgatcagtcacaaagtaatcaaaatcactgagagctagcaagttgaagttgtggctgacgttcaccttggtgtggtcaaacaacagcactagccggtcgctttgggcgcgtaacgtttcctttaaagcaatatcagattcgtaagcgtaataaacgccgtctgcggtcaacccagcgcaactcaagaccgtggtcgtaaatcgaaatttgtgtagtgctagaatgctgtcagcgccttgaacacaccgttgttgtgcatctaatgtgccacccaggatacgcgtttgaaaattgctatgtcgtaatgcctggtcagcaatgtcaagggaattcgtaacgatcatgccggggtgcttggactggagatattgtggtagacaggcaacggtggttgagatatctagaaataataacgcatcatttagtaaatacgaactggcagtgtgggccagggctcgtttagtttgcagtaagtcatcatcccggtccaggtattgatctagcttattaaacgtattcggccgactaatgccgccgtagtttcgttcagccaaattatgagctgcgagtttgacaatatcgcgccgggcagtgtcgcgtgaagtccccgttaattgcataatgtcttttaaactcagtgatgggtggttttttaattcatcaagaatcaatgttaagcgtgttttttggttcataattgatcaccttaagcttttttaagtgttaaacacatactaacttattttagcttaaatagaaagccaatgacgtcaattaatgaaaacggttgaattaatcggcgttgatgttgtggttacgccttgaaacccttaaaattaagctaattagtggcagggctacagcatacctacgaaaggatggttcagatggaagtgaaaaaagtggtcattgttggtggcgttggtggtggtgcttcggcggcggcccgcgtgcgtcgattggacgagttcgcccagattacaatttttgaaaagggaccggatgtctcattttccaattgtgccttaccgtacacattcagtgatgtgattgaccagcccgatgacgtgattttaaagacaccgatgcaattcgagcaacagtacaatattgacgttcaagtgaatacaacggttgtcgccattgatgcgcaggctaagacagtgatgatcaaacggcaaggacaggtagcaacgacgatcgtcccatatgatacactgattctttcacctggtgctcgaccgatactacccgcagtgattgcgggaatcgaccggcccaatgttaaaacggtccgcaatgttcaagatgtccgaacgattcaagcgtatctgactgaacaacacgttcatgatgtgacgattgttggcggcggctttatcggactagagatggctgagaatttacaacaggctggctatcagatcacaatcattgaggctgccgaacacgtcttgggcactttggatgacgagtttgctcagctagtacacaaggaactatacgattacggtgtgcaggtgatactgcaagaacaagtgacggccattggtgcaacacaagtgcagctcgcctcgggacgcgccgtgaccagccagttagtgattgtggcaattggggttacaccagtaactgaattagcggttcaagcgggttgtgcgttaggcgtgaccggtggtatcaaggttgatcatcgttaccagacgtccgtggccgacatttatgcggtgggtgatgccattgaagtgactaatcggcttacacgtcaatctacgcggctagcattggcatttcccgcacaaatgcaggcccgacacatggtggatcatttatacgggcggacgccacagtatcagggtgtgatcggatcgcaggttcttcacatctttacgttaaacgtggcgtcaacgggcctgaacgctactgagtgtgatcaccagcaacttgattatcggttcgcaacggtggcaccacagaatcgggtcagcgtgatgccagggacaacagccgtctttcttaagttgatattcagttatccgaccggtgagattttgggcgcgcaggccattggtcaatcggacgttgacaaaccgattgatattatcgctagtctaatcacgatgcacggtcgagtcagtgacctgacagatgttgaattatgttattcgccatgggtcagtaccgccaaaaatgtcgtcaacatggttggcttggtggcggaaaacgtcctgaatgatgaatttaagcaggttgcggtgacgcaggttcgacagctggtcttggcgggggcgtttatcatcgatgcccgtgaaccacaagagtacgctgatgggcacatcaagggcgctcataatattccactgagtcagtttcggcagcgcttagtggaaattccgaccaatcagccagtttatattcattgccagactggacagcgaagttacaatatggtccgcgcgttacttcagcgcggctatacgaatgtggtcaacattgctgggtcgtatgccgaactagttcagtatgaatattttaatgatcagacaacggggcgaacctcaattttgacacgaacatgatgattgataactaagatattaatttcaacaaaatttgataacgtagcagaggctattgggtaaaatagaaggttcagaagtgttagactgaaattatcataagaaagttggtggcaaaatatgcgaacgattgaagacgatgcagcgcttaagattctagcggatgtgattaagattccatcagttaacgaccatgagttgacggtcgcaaaatatttgcaagccctgttggcgaagtatgatatttcagctaagatttaccccattaccggtgatcgtgcaaatctagttgcagagattggtcatgggcagcctgttttagcggtttccggtcatatggatgtggttgcggcaggtgacctggcggcgtgggacaccgatcctttcaccttagtagaaaaatccggtcagttatttggtcggggcgtcacggatatgaaggctggtttagtcgcattagtcgctgcgatgatcaatattcagcagcaaggtggccctaaacatggcaccattcgcttgttggcgacaatgggcgaagaagttggtgaagctggctcagctgccttttatcaacaaggggcgatgcaagatgcagctggtttactgattgctgaaccttcaacggtttatggaacagcggctgagcagaaggggtcttatgacttaaaattgacgtctaagggtaaggcggtacacagttcgacacccgaacgcggctataatgctttagtcccgctgattaaattactcaatgaagccaatgactattttgaaacgattccggcaggcgaggtgggaccggtcagatttaacattgacgtgttaaacggtggggaccaagtaaattcgttacccgatttagcgactgcactcgttaatgtgcggacgattccggaatacgataatgaccaagtgacccaaaaattaacggacctgatcgcagcgtataatcagcaaggtgctgacattaagatgaccgctatcatgaatgagtcaccaattgcaaccacggctgataatcggttagtaaagttagtgcaggccattggcaagccctatgctggccgcgatgttgtcgttgtctcaagtccgggaattaccgatgcttctaatttggctaagcgtcaaccagccgattttccctttgcggtttatggaccgggtaatatgacccaacatcaggtcaatgaaagtttaccaaaacagatgttttatgactttattgcaatttatcaacagctgtttacacgttttttggccgagtaatcggtgttgattgatcgtaaaatcaaagacccgctagcagtcagtgactgtcagcgggtctttgaatggttagtaccaattttcaggtgcatgggtcggtgttgaaaaagcaacggcaatttgtcgcagggcttcgtaagtttcggcggtatttacccctaaaattgtcgccattcgttgttcactggtttcaaagaaacgttcgatcttggtggctaattggcgggccttgggtgttaggagtagtcgtttgtagcgaccatcgtcctttgctggcacacgaatgagtaaatcagcggcttccattttggaaacgaggctggaacaggttgctttacgaatattgaactctaattctaagtcccgttggaagaggtcgtgatgctgttcattgttggcaataaagttgatcgtactgatttgcatgccagttagtcccagtgattttgcataatggtctgagtccctggctaatgcattgttcgctttcttaatcatgatccctaatgaatcttgcatgggaggactccttaatgatattatggttcgtattctaactaaagtgaattataagaactaattgttaaaaagtcaattaaaatagggcttaaaattttgaaatagtgtgctaaaatagttaattagttcgtattcgaactataggttaaggagctgattttaagtatggaaaaacgtgttgacctcaaattgattcttgcaatcgtggctgccggattactttcattttgcggagtgatcgtggagactgcgatgaatatcactttccctaagttgatgcgagaatttgcactcaatacggcgacggtccagtggatgaccacggcttacttgttagtagtcgcaattattgtgccaatttcggcgtttctgaaacgccgttttcgcactaaaacgctgtttgtgacagccaatttattgtttatactgggattggtcgttgacgcgaccgcgaccagttttcccgttttagtcactggacgaatcattcagggaatgggaactgggattgctttaccgttaatgtttaatattattattgattgggcaccagcacggcagaaagggaccttgatgggaattggcacgctgattaccgcaatcgccccagcactggggccgacttttgggggcttgatcgttagttggatggattggcattggattttcgtattgctaatcccggtactcgtgatttcacttgtgttagggctgtatgcgattcgacaagcccagccgacagttaaagttggatttgatgtggtcggttggctgatgatcgtcctcttattcgttggctttacaattggatttagcaagttagccacgattaccacgcaaccactgatttttgtggcttggctagtggtcggtctgattggtcttgtggggttcgttatccgcacacgtcgagcggcacaaccgctaatcaatctggcgatttttaccacaaaatcttatgatttgcacttaatggcgtactttttggttcaaatctgtgccctcgggttggccttcatattgcccaactacatccagttagtgaacggcaagagtgctttgttagctggcttatttgtactacctggcgcggcaatcggggctgtttttgccccactaggtggacgtattctagacagtctgggtgcagccaaaccagtcctaacgggttcaacaattttggttattgccatggcactgtttacggtgttggggatgcacctgtcaggcggttggattttagccatttacattttattaatgattggtattggcttaaccatgggtaatacgatgacgagtggcttacagcagttgtcagctgagcatcaagctgatggcaatgccgtgttcaataccatgcagcagtttgcaggggccattgggacttcagtcgtgtccgccgttatcacgttagttcaagtacagacgactggaacgagtgcgcatcggacagcgttaggatcaaccatggccttggggttgttgctgattttagtgctgattgaattggggaccatgatattggcaatgaagacgcgtcaagctggtcaacgataaaaatgttataaaaagattgacattgttttgagaaggtgtaatctttagttgttcaaaagttaatcggcgatgacgttcgccacataataattgataatcaatttgatgacgtctactgtttgtttttcagacagtaggcgtcttttctttttggttaagaaggagagattgatatggaaaaacaagttattgaaacggtaaaggctcgcgaaatttttgattcacgaggtaatccaacagttgaggctgacgttattttgtcagatgggacgctaggacgcgcggaagtaccatcgggagcttcgactggagaaaaagaggcagttgaattacgcgatggtggtgatcgtttagcaggtaaaggtgttcttaaggctgttaataatgttaatacggtcattaatcatgctttacatggtgctgacccgtttaaccaagcccatattgatcaaatcatgattgacctagatggtacgcccaacaaagcgcgtctgggtgcgaatgctattttgggtgtttcaatggcaacggcacgagcggcggcaaacgcattacagcagccgctttatcgttacttaggtggcactgatttagagctaccccaaacatttcataacgtgatcaatggtggggagcatgcagataatggcattgatattcaagaattcatgattacaccggtcgaacgaaccagttttcgggacggttttgaaaagatcgtgaatacttatcatactttgaaaaaagttatcgaagatgccgggtacacgactggtttaggtgatgagggtggctttgcgcctgatcttaaaaactcagaagaagccttgcaaatattacatgatgcgattattaaagctggttatacacctggtaaagaaattgcgattgcttttgacgcggcggcatcgtatttttataatcgaacgacccacaattatgactttgagggcaaaacgtacacgccggcagcccttggtgattattatctgcagttattagcgaagtttccagaaatcgtttcaattgaggacccatacggggaagaggactgggataactttgcaagctttacagctgctcatggtgaccagcttcaaattgtggctgatgatccggtctgcactaatccgcaattaattcggcaagcaattcagcgggggatggctaacaatattttaattaaattaaatcaaatcgggaccgttaccgaaactttggccgcgattcggctagctcgcaaaaatggttatgccacgatgatgtcacaccgatctggcgaaactggtgatactttcgtcgctgatttcacagtggccaccaatgcggctcaactaaaagctggtgcgccagcccgctctgaacgcattgaaaaatataatcaattattgcgaattgaggaagaattaggtactgatggtgctcggttggcacacttcccaaataacgtgatgtttgactaattatttgtgataaacctgattcgacagttaggttgccagtggtgcttgtcaaattcgaggtgcagacatgattgaagatttaacggagcaacaagcagccgctaaactagcggcagatggatttaatgatgtcccagaaccaacgtttaacttttttaaggccgtagtcagtcgtctatgggaaccatcggcatggattttggagggagctttagttattgaagttgttttgggtaaagaaattcaggctggctttattgcgttaatgctggtctttgcagccgtcaatggtgcaattcaatcgcgacgtgcggccctggttttacaggagctggcgcatcaattgacgccaaccagttcggtacgtcgtgctggtcattggcagttgattgatgcgaaggctttagttgtgggtgatctgattagtttacaggtagggagtgtaatcccagctgatattcgtgtgttaacgaatccaattcatacggatgaaagctcaataaccggtgaatccgttgcagttagccatacgccgggtgaaacggcctttgcaggcacaatggtggtagccggggaaactttagcacgcgtactggcgactggaagtcatagtcgggctggaaaaacagtcagtttgattaatcaaaacaatgcgcctggtcatttacaacgattattgggtaaaattattgattacttggcattgttagacagtgctttagcactcatcattgttggaatagcgttaattcgccatgcagacatgattcagatgttaccgtttctagcgatgctgttcattgcgacgattccgattgccatgccgtcaagttttgcagttgcaaattcggtagaagcccgtgaacttagccagcagcggattctggtcagtgaattaaagggtattcaggaagctgccaatttgaatttattacttgttgacaaaacgggaacgataacgacaaatcagccgcaagtcgtgcagtttaaaaatttgtcggccagatcagatcagcaattgttgcggttagcagctagcgcgaccgattcgcgacatcctagcgtggtggatcaagcaattgtgaactttgctcatcgctatcagttgaaacggctgccacagcaggaatttaagccatttgatgcaagtgttggttatgccgaagcgctagttggtgaagcgccaacagttgtgcgggtacgtattggtgcacttagtcgtttgtacgagttaaccgcacagcaaccggctttagcaatcgaccaactggatttgacccggggccgttcagtggcggtcatgattaataatgttttacaaggtgtgttgattttgcaagatcaaccgcgcccagatagtgcggcggccttaaaaaggattcaacaccggggcgttaaaacgattatgctgacaggcgataatttaaaaacagcacaggctgtggctgatgcggttggattaaagggccaagtggtttcctaccagacctttaaaacgcactcgcgaccgttagcgcaagttgctgggattgccgaagttgttccagagaacaaattggcaattgtcaaagctatgcagcgcgcgggttacgtggtggggatgacgggcgacggtgttaatgatgcgccagcattaaagcagtcggaggttgggattgccgttgacaatgccactgatttagccaaacgaagtgctaagttcgtcctgttaacgggtggtttggcaaatattctgacgattttagacagtggtcatcgcgtctaccagcggatgctgacttggacaattaccaaactcactcggacggtcgaactgaccgtgcttttaacaatcggctatttatggctagattacgtgccattgtcgctgaatgcgatggtattagtggctattctgaatgatttagtaacattggtccttggcactgatcgcacaatcattcgccatcgtcccgaacagtgggatatgccccgcttaagcaaaattgcggggttcctagcgactgggtggacagctgtgggtgttggtttgatagtctggctgcatggtttggggttgtctgctggtcagttgagcactagtctttacgtctatctcatatttagtgcaatgttaacaatcttgatgactcgtactagtggtccattttggcggggacggcctagtcgcgcagttgggttgaccatcggcttgaactgtctgttgaccatcggattagctagcagtggttggggagtgccggctattagtggctggctaactttaatagtgatcgtattagtgttaatgactggtatcggtttgacggtggccggcgacctctggcgacgattgactaaatgattgcaatgctgatattccgcaggggattaattaattgcgaaaagcgtgaatctcagctatcgttaaattggcattaaaaacgaacggaggtagcaaagttgcaagcatacgtcgtgaaccaactaggtggaccagaagcgttacaattaacgacacttcctgaaccgaacgtcaaaccggggtggacccgggtaaaagttttaggttttggtatcaaccactcagaaatctttacgcgggaaggcaagtcaccgagcgtgcagttcccacgagtgctcggaatcgaagtagttggtgtggtcgatgagaccagtgcgccagcaacattcacgtctgggcaacgtgtggtttcaatcatgggtgagatgggtcgggcatatgatggtagttatgccgaatacgtattattaccgaacgagcaggtttatccgatcaaaacgaatctatcgattgcctcattggtggcaacccctgagacctactacacggcctatggcatttttaagtctttgcagcttaaagcgacggaccgggtgctgattcgagcagctactagtggggttggaattgccgatttaaatctgatcaaggcttataatccaaagatccatgtggccgggactactcggcggctagttaagcgccaacaattgattgatgctggctttgatgaggtcattgtcgctccggatagcgctcgtttaccagccgcaacggctcattttgataaaatcatcgacttgattggtccgctcagtgtcaaagattcattgtcgcatctcaacgaaggcggcattgtaaatatgacgggcgaattaggtgggctgtggaccgttcctgattttgacccgattagtgatattccgaatgggtgttatttagcgggcttttcctctggcgatgtttctcagacattgttgcaagatttatttgacttcatcgcagcatatcatgtgtcggtcgcccccgctcggatttttaactttaatcaggtaccggcggcccatgcttatttgcaagcggcagacagttttggaaaggtcattgtgttgttggaccaaaacgctgagtaatctggtggttggatactgctcagcctagtacttgcatgtggggcttagaccaccggattgaaatctgtaaaggaatctataataaagaaatcacgatcgtgtctgaccgtaaatcggctaatgctgactggtctgacgcgatttttttgcctaaatggtcgcttaagtgtatggtttgcttgaaaggtaaagcagttggaatcgtatcaaaaaatacaatcattagctggtaatgttcgcgaagtgtacttgtaatcccatgggaatctattagactgggtttaaggttgaccatcggttgatctggtaaaaattcgaagaggtggtagcagtgacgatgatttctagtccgtcgatggaggtcactgacgttggcgattacctcaaactaggggcctgtactgcggtgatggcccagccaattctcacagacgcattggcaagtgggccgtcgattgccacgcaaactgggattggtgttgtttataatctggtcaagtatacggcaccggcctttatttttggcattctctatacgacgacgcgtttgacgcttaatcagaccgcgttgacctataccgactatttgcgccagcaatggcatgcgctgtttattccaacgatttggtggaccatgatctacttaatcttgatgccacaattgcagcaaggtagccagtatcatgactggcggggatttttctggcagttcgttaatggtaatgcagcgcctcatctgtggtataacaccatgatgctacaatttatcatattaatgccgttattctgggcgcttggccgttggtgtcagtctcgacctcgacgcggctggatcgtatttggcggtacaacactggtcgccgttctttggttgtggttttatgaccaacaagttttccatggtcctcacagccgtgattggtatttactggaccggctttttatcagtttccagattttcgggttctatggcatgttagcttgggtgtttcgagatacctttcagcgcatgcttaacaagtggtggccgggattacttggtctatggttagttggcctgatctggactaattgggaactgttcagttacggcttcccggttaatttgcgcaacgccccgtattacaaaccatcaatgacggggtatgcgctagcagtcatcggcctgttggcggcgttgtgtgagattcaagcttgtcgtcaacgtccttttagcaaatttgtacatttctttgctggtatggcctataaggcatacttagcgaatgttttctggtctgaattgttgtggcgtggttttggtcgtactttgatggtcaaggctccctggctgagcattgcgctgtgttatggtttgacctggttattgtcctttacaacggcttttggtctgcatgcaggatggatgcgacttaaacgtgaatacgagcatgattaggggctaaccttgtaattagtcgtattcttcatgattaaagcgggacaattgtcgtgtcatactgggatgtaagttgaccagaccactttctgaatcggcttgaggtgtcgtgaaattgaaattgcgttactgtgttaatcataaaattattgatgctgtgcagatgttcgatgacaaaataagcacgttgtaaaaatcaccagagtgtggttttacaacgtgcttattttgatgtgggaattaggtcaacagggcttttgctgcgcgctttatgaagtagcgtttttgataagtgactacctgataatttttcaaatgaagcgcctggttgtttggttgttagttgaccacgattgtctctgtaatttgaccagcattggggtcggttagatagttaatactattggtcatgccaacttgcgcgggaccggcctttaccgtaatcgtcgtggcgacttcaccagcttttttttgatccatttgcttaaataaatcaacgtctgttttcggtaggtcgttagcagcgacgacggcactggttttcgtataggtcgtaacaatctgctgattgatacgaatgattttattagcgttgatgatgagatataacataccggtactatcaccactggcaacggcggtatgtgttaattgatagccagcgtgggctgcatcggttttgaaggccgcataggtcacgttttgattcagtgagcctaatgaatagtgactgaggtcctggatagcagatcgttcataactatcataacgatgctgatatagatagccatctttgatcagcaacttgcctgtatcgctagcgctagtcgtagtttcggcagcaatccaggtaccattcaaattcgctacgttgacgtgtttaggcgccgccttggcactagtatcagtgaaagcgcggccccgttcaatggtcgttgcctgttcagtatctgaatattgaatgttgacagcgtagaggtggtgccccttagcagcaaaggcggtgttgactggtaacggatcggtgtgattgccggattccaagtaaatcaagtcagtcagtttgttaatctggattgaggcaccgagctttttcaaaaccgcgttgatctgactaactgacatgtgatgcagccggtgtcggtaacttttcatgatatggcgttgctgatcatggtgccatttggcgtacgaaacttgacgatgtttgacgccggcggacaaaaattggccgttactagtggtccagcttgattgggcagtagttttgtcaaccacggaaatgtctaaattgctggcgacgccgtgttttgtttggctggaactaacggcttgatcaaaagtccatgttttggttggtgcttgaatcactttttgggtcgtcgctttgacggaccgatgatgcttcactggagcgaatgtttgggtcgtacaaccagcaagtgcaaggccaattgtcatcaccaaaatagctaatttgtgcattagggtactcctccaaatcaataggtatcgtgatcatcagtatagcatatgcgattatggtgagtgtcaattgtactggacctggtgtgcgcagggttcatgagtgttgggaggtttcacaactgactgcttattttctgttgagtcgtgcacgctaatctattgatttcaatctgcatcagtttaaacgaaaaatgtcgtggtgcttgatggctagggttatttggatggtgagtgtttcgaataacagctagtccgatttaagggttgacgatgatgaaaaagcgtgtatacttctaaaagtagttagccggctaattaactttagaaagaaggatttcaatgcctgacttttcgtttcgtgatcgaccagataaacagcgagtgcaattgacactgggcaaagcaagtagctcggcggatgctgagcaggtgttggcttttctggattttcagtggacatttcgaaccatgcaagccacctatgaacaattactcgatcaatatcaactttcagaatccaagtttattattttaatgttgctggaaaatgaaactgatcacacgctattgccgtcggagttagccacaaagctagggtctgctcgggcgactgtgagcaagttactggtcggcttgcaaaagcgaggctgggtggaaaagcagcatccacaagatgataagcggacggttgccattcatttgaccgccgccggtagtagtgttttgacgcaatttttaccggccaattttaaggcggttacaacaatttttgcgtcgtttacggttcaagagcagcagcagtttaaaggcttattggataaaatcaagcaaggcacccaacaattaaaaagtgaggcaattaattatgaatgacaagaaaattgaattgttaacaacatatttaagcttatacatcgatcatcacaccgttttagccgatatgcaaaatgcgacgggcaagtacgtcgtcttagatgttcggaatgcaccggcccaagtgaagaaagatcaaatcaagggtgcaatcgcgatgcctgccaaggatctggcaaccagaatcagtgaactggatccggcgaagacctatgtcgtgtacgattggacggggggaacaaccctaggcaagacggcgttactcgtgctactatccgcaggctttgacgcgtatgaattagcaggagcgctggaaggctggaaagggatgcaactgccagttgaagtgcttgcgtttttgtgataaacactgggttgcgtcgtccacaatgagttgatttcgtatattgtgaaataagttcgttaattagttggccttacagtttatcattataatccgagttgatttgaaaacatgtccccattaaatgccttttctttcaagcctgtgttgaactttaacgggcgtaaccagtcaacatcaccaactatattttgccgataaaataatgaaaatgggttttactttgtgtaaaaatgaactacaatataaatggttaatgtaaacgcttacagaacttaagtttgataatgatgatattcaagtgcaggaacatagggaggtaatcttatgagtagtcgtgatacggcaaacgttttatggtttgatgaattacaccgcgaagatgtgaacctagtgggcggtaagtcgtcttcactgggtgaaatgacgtcatcgatggatgttccagtcccatatggctttgcaaccaccgcccgggcgtatcagtacttcatgacccagacgggattgaatgataaggtcaatgatttgttagccagcattcaggattatgaaaattctgatgaattgcatactgcgtgcgaacaaattcgtaacttgatcgtgaatgcgacaatgcccgcagatctggcggctgatattgaacaagcctatgcggatctcgctaagaaaatggggcaaactgatccgttcgtggcgattcgctcttcagcgactgcggaagacttaccaaacgcttcatttgccggccaacaagaatcttacttaaatattaaaggtgctgccgatgtcgttaatcgggttcaacaatgttactcgtcactgttcacggatcgcgcgacatattatcggcacaaacagcattttccacacgaaaaagtggccctctcagcggcgattcaaatgatggtcttttctaaggcttccgggatcatgttctccgtcaatgtagcggatggggatgcttccaagatcgtgatcgatgccatttatggtttgggtgaatatattgtgttgggcaaagttacgccggatcactttgttatcgataaacaatcaatgaaaatcgttgaaaagaatattatcaaacaacctgtccaattaatgcggttaccgggtggcgggactaaggaagagtccgtccccgatgaattacagggtcagccagtattaacagatgcgcaagtcattgaattggccggctacgctaaagaaatcgaacggcattacggttgttatatggacatggaatacgctttggacacgaataccaaccggctatggatcgttcaagcgcggccagaaacagtttggtcacagcgtaataagcacaaagatgcagctgacgatgaagatgttgtggatgaggcggatgccaaagttatcgtccgggggttaccagctagtccgggcttagccagtggggtcgtgcatgtcattgataatccgaaagacattgatcagtttaagcaaggcgaagtgttagtgacgttaatgacatcaccagattgggtaccggcaatgaagaaagctgcagcgatcgtgactaataacggtggcatgacttgtcacgctgcgatcgtttctcgtgagatgcagattccatgtattgtcggcactaaaagtaaggaagtcgcggcaaccgacgtcttgaagaccggcgatgtcgtaacggtcgatgctaagaacggggttgtttatcaaggtaaagtcgctagcatgttgaagccaaagagtggtgctacggcggttgctggtcaggtggttgcggccgagagctttgctccaactgctacgggcgtgatgatgaatttgggtgatcctgatttggctgacaaatattcaagtttaccagctgatggaatcggcttaatgcgcgaagagttcctatggacaacctttattcatgaacatccactatacttgatcgagcagggtcaccctgaaaaggtggtcaatatgctgccggatggtatcgcgaaggttgttcgggcaatggcaccacggccagtcgtcctacgcttctcagactttaagtcgagcgaatatcgtaatttaaagggtggcgacaaatacgagccgcatgaaccagctgatttactgggttggcggggtgcatctcggtactatgattccaagtatatcgaggcattcaagttggaactggctgcggtcaagaaagttcggaacgaatttgggttgaagaatttaaatgtcatgattccattcgtacgaaccgttgacgaagcacaaaaagtaacgaccattatgcgcgatgaaggcctagctcggagtgctgacttcaaagtctatatgatggctgaaatcccaaccaacattattttggccgaccaattcaatcaattcgttgatggctattcgatcggttcgaatgaccttgcaatgttgattctgggttgtgatcgtaataatgatacggtggctcacctctttgatgagcggaacttggccgttaaacgagcgattcggcacctgattaagacagcccataaagatggcaagacggtttcgatttgtggtcaagcaccatcagagtacccagagtttactaacttcctgattcaaagcggcatcgactatgtttcagtcaatccggatatggtcaaggagactaaacgaaatgtggcgcactttgaacaacgcattatgttggacaaagcgactggccggggcttacaggacccaattgattataaatggtaaactatgattcctgttaaaagttaaataatcactaaaggcgaaccaattcgtaactgaattggtccgcctttaagtttgtttagagccaaatactgattcagggttaattcggagcaagaggtcatctaaaaatgacgggcaggtggcatatgatttactttttaaactgtttcaagtaccgactagcaaataatttgtgaaacttaacgcccaaagtcgggttggcagcgtcaatatccgcatacatcgcggtggtaattttggttaacaagggtgccagttgatcgagctcgtcgtcagaaagcgtgttgacaaatggggggacctcctgggctgcggatgcaatctctttgcgaccagcagccgttaagttcacaaggttgacgcggcgatctttggtggacttggataaagtgaccagctgacgattgacaagtttatagacgaactcgctcgttgattgcggcgacatgccaaggcgacttgccaactgtttttgtgagaggtggtcctcatcggctagtgctagtagaatcttgccctgaccttcaacagttattcttggacgggcctgcttgacaatgtcatcataaattttgcttaattgttcgtactcggccaattttccggcgactagttccgccttaatattcgttgtcacgattgatcattccattcgttcttttcttaagtatacaacattctttggtatgcggtacgttaaggttagttgatttttagattgatggtcaataattagtcgttgacaatttagtcagggggccttaacatatatttagtcagggcacctgattgatttgtgggaggttttaacttggatgaagaaatgatgattcaaatgacacatgttcagaagcgatttggaacgaaagtcgccgttcaagacttgtcactgcaagtccaacggggtgaaatttttggcttattgggtcctaatggtgcgggtaaaacgacggtcatcaggatgatgacgaccctattgcgacaagatgctgggaaaatcttagtcaatggctttgattcattgtcgcaagcccgacgcgttcgccagcagtttggtttgaccggtcaaaccgctagtatcgatcaggacctgagtgcgcgggaaaacttgcagatttttgggcgcttgaatggtttaagccgtgcggcggcgaagcatcgagcgatggaattactgacggattttgatttgaagcattctgcggatcacgttttggccacattttctggcgggatgcggcgacgattagatttggcggttagcttgattggtaaaccggccattctttttctcgatgaaccgaccacgggcttggatccgcggacaagagcgcagatgtggcaagcgattcgtcaactagtggccgatggttcgactgtggtgctaacgactcagtacttagaagaagccgaccagttagccgaccacattgcgctcatagatcatggccagttagtcgccagtgggacgcccaccgctttgaaacaaacagtagggggtcaagagcttgaattggaagtcagtgcgacgacggccgtcacaccggctaaggatatcttacaagccatgctcggtcaagatgtccgtgttgcggaacggaccctaacagtgccgttggataccgctagcttgacgccggtcactgaaattctgatgcggttacaagctgctcaaatcacggtcagtaactttgcgatgcacgcgccatcgctcgatgatgtgttttttaaactgaccgtgggcacaaattagaggaggacaaagcgatggaaatcaaacaaccagcagagttaagtcatgttttgacaatgacgcatcggaacttattaaaaatgtggcataatccagataatgttagtgacgtggtgatacaaccaattatttttaccctattattcggttacttgtttggtggggccattgcgggcagtgtccaggcctatttaccaatgctagttaccggtattttgattcaaagtattttgaatgcagcatcgggatccggacagcaattacgtgaagacattaacgcgggggtgtttgaccgcttcaagacgctaccgatttcaccgatcgtaccgttagccggtcagttagtgggggatgttttccgattgcttatttctggcttgatggcactggtgacagcttttatgatgggctggcgacctattgttagtccgctagtattgatcggcgttttactgctggcagtatttgttggatggtcgctttcatgggtctttgctttagttggtttaatggtcaaaaatgcggccctgattggcagtctgtcaatgatcattattttagtgctgacctttttatctaacgcctttattccgactaagacgttaccacatttgttgcaaacaattgtccgattgaatccggtcagtctaacaattaccgcgatacgcacaattttgcggactggccattgggggcccgatgcatttggtgtactgttaagtggtttccttattattgtgatttttatgccgttaactgtgttggcatatcgccgatttggttaacggtacgctaaaaatagtgtgtgttgcggcttaatgaccggcagcgcacactatttttgaaatggggaattactgcccgttcgaaattgatggtgatgaaaagtgtcagataagtggagactgatacttgcgagggccaatgattggctgcaattgttgttcgtggtgccaacaagcgataatgagcaaaataataatcaatacttgcatagaagataaaacgaagtctgtcaatccataggctagaatgatgggcaaagtcatcataaagtaacgcaaattcggcgtacgatactggtgccaatatttggttaagtgccagccactgctgaggactaagtaaataaagccggcaccgcctaggataccaaaagaagctagtagcatgagcaaaatatcgtgggcgtgtgggacgtaggttcccgtcagttgcaaatagtgccgcgcaaagccaaaatacgtcacgccgaggtacggggcctgtttgaaaacggtgaagctgttgtgccaaatcgtcaagcgactttgaagtgcggtgatggtcgaagcacttctagggaaaacgtgccagacaattaaactgccagcaatcaagattgttgtaaccaaaatgcgatggtgacggcaaagctggtaagtcgtcatgatcagaatggcaatcatgatcatgagccctgtgcgcgatttggtttgataaacgcccacacaaagtaagccgaccaaaaaccagtttatgagcggccagcgcgtgaaggggtgaacacttccatgacttaactgtgtcaatagtaagccgagggcaatcaataataaacagcaggcatcatttggattataggcggacccgaacaagcgattctgattagcagcatagccccataataggtcacccagcatgaacttcagccacgttggtaatgtcaatacttggttaagccagtggaaagcaaaaccactaattgtaatatacaagccaaattggatgataaatttacgaagctcgtgccaagcaatcgactgcgtggactcacgacacaacaaccaaagattgcccaatacaaaaagcattaggacagacagaataacactacgataatcgtggtgattgagattgagcgtcgtgatgcccattaataggacgataaaccctagcaacgggtcgtgccgactgaattgtcgtggatgtttgagtaacgccagccattgccaccggcttaaataaatcagccatccgatacctaccggcggcagaatagctaataattttaggccagtcaaaaatggcgacgtcgttaaaagacgttttcgcatggttaatcaaactttctctcattagataatatgtcgcttgccagtcgacattagccatattatggcacgtctgcctgtcatccaaacttgcattaatagaattttagttagtttgaacaaagcttaggaattttcaggaaaatttaaccagctgaatgcgtattcacagtgaagcatggtaaaatatgattagtaacgtacggtgatacgggtgctatcctgaatcaccattgaaatgcgttggtttttaaggtcaaagatgattggccaacaaaggtctaatctagtgtgcgacctttgttcagactgctaacttccaggccattgggtatcgccatgatcttagttgaacctcgttgggtatttctgataaagagccgacccgtaattcaacgaccagcacgtttcgattttggtgcatactaaggatagcgagtgacgtgcgtggttagttaaactgaataattaaaacaattgaaccgggtggatttgaccacaaccactgaaagttagtcgtgtgggtaaatcttcccgaattaaaggggaactgtatgtggatgcaaaacaattatcaaaacgattagcaacggttggcgctttcgttcagccgggcgcccgcgtggccgatattgggtcagatcacgcttatttgccagctaatctcgcattaaatcatcaaattagttatggtgtagctggtgaagtcgtccgggggccctttgaaaatgcgcgtcatgagattcaaaagctggggttaacggattgcttagtggcccgtctagctgacggtcttgctgcgattgaaccagctgatcgtattgatacggtcacgattgccgggatggggggccctttgattcgccatattcttgaacaggggccgacccagctcgccggtgttcaacggttggtactcgagcctaatgttggtgaagcgaccgtgcgggaatggctggcggccaatcagtttcaaattgtagctgaacgaattctagctgaagatggccatacttatgagattctttgtgctgatcgggttgatcatcaggtgacgtatacgacggctgaacagatgtttggcccgtttctgctagctgagaagtcgccggtgtttatcgctaagtggcaacgtgagttacaacgagtaaatgcggcggttgcgcaaatgcaacgggctaaagtgataccagaggaacagttagcgctggctcacgctaaaatcaaattgattgaaggagtcttgacggatgcaagcaagtgaattaattgcgcgttttgaaaaatttgcgccactcaagttgaagtgggagcatgatcccaccggattacaaatcggcgatcctcatcaggatatccacaaggtgttagttaccctggatgtgcggccggaagttgtccaagaagccatcacgatcggtgctgacatgatttttgctcatcatcccgtcatgtttcgaccggccaacaatcttgattatcaggatcctcagaaagcaatgtatgcagaacttgcagctcaccacatcttggtgtacgcggcccatacgaatctggactgtgctgagggcggaatgaacgattggcttgcggcggccttagacttgcaaaatgtgcagggattggttcctgggtatcgtgcacaggctgttaagttgactttaacggtaccgaccaatcaagttgaaacggtacaggaatacttaacgaataccgtgggtgccacgctagatcgttacgctgtcaactcgggtgaacagttcagcgtcgacttactagccgatcagattccaactgcggtagcgggcattaatgacttagccgctgacacgtgggattaccaggtcgtgcaactgttgtctggcggtcatcagtattatatgggccgagtcggtgatttgccgacaccgttatcagcgcaggcatttgccgaacagtgtaaacaagtatttggtgtcagcggcctgcgactagtcagtgccgatccccgacaacggattacccgtgtggccgtcctgggcggcgatggtggtaagttctatccccaagcgttgcgagcaggtgcacaagcttacgtgaccggggatgtctattatcacaccggtcatgatatgctggcagccgggttgacggtcattgatccaggccaccatatcgagagtatttgtaagtcacaactcactaagctgtttgatcagtggcgtgtacaagctggctggccaatcgagattgtggcgtctcagctgaatactgatccgtttaccttcatctaagttaatcatgaactttaataaggaaaggaagttatcatatgtcaaaatatccaaacttaatttcagattttttaacctttgtcaaaattaatagtcgttcagatgaggaatcaacgacaattccttcgtcaccacgtgaaacggcctttttaaagcaattaatgagtaagctcactgatttaggcttgagcgatgttgaacaggatgcgcaaagtgcgtacgtttttgcgacgattcctgcgaatagtgacaaagctgttaaaactcttggctttatttcacatattgatacggctgactttaacgcggaaaatgtcaatccacaaattgttgacaattatgacggtgaatcagttattaagctcggaaacggggactatgtgctggatccggcggtcttcccaaacttaaagaactatgctggtcacacgctgatcacaactgatggaaccacgctgcttggagctgatgataagtctggcgttgctgaaatcattagtgctgcggaatatttgttggcccatcctgagatcaaacatggcaagattcggttagcttttggtcccgatgaagaaattgggactggtgctgatcactttaatgtgcctgcctttggcgccgattatgcctacaccgtcgatggtggtccgcttggtgaactggagtatgaaacgttcaacgcggcccaagcgacggtgacgattacaggtgtcaacgttcatccaggggaagctaaggataagatggtcaacgccttgcagttagccgttgattttcaatcggcgttacccgcacatgatgtcccggaacacacggaaggccgtgaagggttcttcttcttgcttagtttagacgggaccgttgacagcgctaagatgacttacattattcgtgatcatgaccgcgataagttcgaagcacgtaaacggttatttatggcaattgcggatcggctgaatttggctgacggtgtggcctggatcaaggtcgacatgaaggaccagtattacaatatgcgcgaaatcattgaaaaagatatgcgggtcgttgaattggccaaacaagccatgctcaagctcggtatcacgccagccatttatccggttcgtggtgggacggatggctccaagatctcatttatgggcttgccgacaccaaacttgtttgctggtggtgagaacatgcacggtcggtttgaatacgtttcagaacaagtgatggcccaagccgtggacgttgtcttacaaatcgttcaggataattatgaccaggactaaatccttgaccttgtttgaccttacgggttatactctaatagtcaataaaggtcaaacaaaaattggcagctatgacggctgcctttttgctaccgtttttgaggaggtacgtaaatatgaatccagaacaatttacagaaagtttacaacaagccttacaacaggcacaacaaatcgcacaaacacggcgccatcaagaaattggggtgccccatctatttaaatttttaacgcaaccaggcgaactggttcggcagatctttagtgaggccggcgctgatttagaccaattacaaacagagctcgaccgtgagctggatgacattgccgttgttagcggtggtaacgttcagtacggtggcagtatgagcagtagtctagctacgctgatgcaggctgccgatgctaagcgcaaagcgttaggtgatgattaccttgcgaccgacactttggctttagcgctgatggatcaaactggtgatcagttgaccaaatacttgaatcagcaaggcatcacggcaggacaagtcaagaatgccgttgatcgtattcgcgggggtcaacgggtcacgtcacgtaatcaggaagatcagtatcaagctttggaaaagtacggcgtcgacttggttaaacaggcgcgccaggggaatcaagatccagtaattggccgggacgaagagattctggacgttattcggatcttgtcacgaaagacgaaaaacaatcctgtcttgattggtgaaccgggagttgggaaaacggccatcgtggaaggtctagcacaacgaattgttcgtggtgatgtgccggagaacttaaaagataagacgttgttctcgctagatatggggtctctgattgccggggcgaagtatcgtggtgaatttgaagaacgactcaaagccgtcctcaaggaaatcaagaagagcgatgggcagatcatcatgttcatcgatgaaatccataatatcgttggtgctggtaagacagaaggcagtatggacgccggtaacttgttgaaaccaatgttggcgcggggagaacttcatttgatcggggccacgacgttagatgaatatcgtcagtacatggaaaaggacaaggcactcgagcggcggttccaaaaagtattggttgctgaaccgagtgttgaagatacaatcagtattttacgtggcttaaaggaacgctttgaaatccatcatggtgttcggattcatgataacgccttagtggccgctgccaagttatctgatcgttatattacggatcgttacttgccagataaggccttagatttagtagatgaggcttctgctgaaatccgggtcgaaatgaactccaacccaacggaattagaccaagtcaaccgacaattaatgcgtttagaggtcgaggaagccgccttaaagaatgaaactgacgatgcctccgttaaacggctagcggatgtgcaaaaagaactcgccagcgcaaaagaaaaacagcgggctttatccgaacgctgggacagtgaaaagaagagcctccaagcgttaagcgacaaaaagtcggcgttagacaaagctaagcacgacttggaaaatgctgaaaataattatgatctggaacaagcagctaagttgcagcacgggacgattcccaagctggaacaagagttgaaggccatggaagccaatgatcatcatgaagattggttagttgaggaatccgtcacgccagatcagattgcaaacgtggtttcccggatgacaggaatcccagtagccaaactggttgccggtgagcgggagaaattattacacttggcggaccatttgcatgaacgagtggttggtcaggatgcggcggtcgatgccgtttcggatgccgtattacgttcgcgggccggtttgcaagatcctaatcgtcccctgggttcttttatgtttttaggcccaactggggttggtaagacggaattagcgaaagcattggctgagaatttgtttgacgccgatgatcatatggttcggatcgatatgagtgaatatatggagaaagagtccgtttcgcgattggtcggggcggcaccgggctacgttggttacgaagaaggcggtcagttgaccgaagctgtccggcgtaatccgtactcgatcgtgttattcgatgaaattgaaaaggcgcatccagatgtgtttaacatcttgttacaagtattggatgacggtcggttgacggatggtcaaggacggaccgtcgacttcaaaaataccatcttgattatgacgtcgaacttaggatcagagttgctactggcgggggttgatgaccagggtcacttgtcggccgacacccatcaacaggttatgcagctggttcaaagtcgattcaaaccggaatttttgaaccgaatcgatgacatcattatgttcacgccactacaattgggcgcaattgaggaaattgtggtgaaattgattgatcggttgtctgcccgtctccaagatcgtgagattacactgaaaatttctgacgaagcgaagaagtggatcgctaagcaggggtatgaaccggcatacggtgcccggccgctccggcgctttatcacgaatcacgtcgaaacaccgctggcaaaagagatcattgcggggcgcgtggcaccaaaatcgacagtcgccattaatttgatggacgatcacttagtcttcgaaaaccaatcgacccagccggcataagcgtaatcactgatttgaacgcgtgataatgcgtttcagtgacgataattgggccaataaaaactggaccgtgagcaccttgcgatgctcacggtccagctttttttaggcggattattattgtgacttggttgagcctatgattctggatggcttgatcgtgtaggtgtgaggcagctatctttggtttatgatgatggtagccgcgcttagcttcggacgagggggaccttgcgcccgtgcgtttaacctcatactgagaaaagagttgttaccgccgacgctgtcgtgttaagctactccaaaatcgaggagtaagcgaacatggacgacgatcgtaaaaggtttgaccagtatgcaaaaaatgaatcgaaaaattaatgtacaacgtggttctttatcagcggccgatttggcattttgggcagcagcacaacgcgcaaagcagaaatatgccaaaacgctgcaaatgctcaaagcaagtgatggatcgtaagcgtcattaatctgaatgttagggtcgggtatgtaccagcattctagttggctggcgcgtcaagcacacaacaaaaaaagacgagtaaccgcaatcgggatactcgtctttttttgttgtgctgagactaagcgaagcaaagcctctggttgtttttaattacttattatctgaacctttagcgggttgggaatgattagtaatataagtgatgctgttgaccacgattagcgcaaaaattgcggcaacgatgccaatttcaccaggattataggagagttgttcgagggcgccaccgatatagccgatgacttcaccgaagaggacactccaaaagataatcgtaagttgtctcatcattttccgacacctcccaatgaaaattattttaacacaccgacaggaaaaagcaattaggtaataacgggatattaaggctttaattaggctgatataattacgacgagacggcggtgaaaccctagtaaacataaccgtgcacgttatctgatgacttaaaactgccgcttagaacaactgtttggtataatgaatagtaacgaatatatctgaggacaagattggtcatcaactggcattgaatagactggtaaattctttgtttacccatcaattgggagcgggcttgacgtagctgatcggatgttacgttttcgatgcgagttgaaagctgatattttatgaaagggggcggcgatagtggcgcaatatgttccattgcaagtattgagtacttttagtttacttcacagcactagtacagttagtgagctagtccaaactgccaagcaacaggggtattccacgttggctttaacagacgttgatatcatgtacggtattgttgatttttataatgcctgtcgccaggcagaaattaccccgatattgggaataacattgaacttattaggacgtgaactaacggcgcaaacgtttagtctggtcgtgcttgcgaaagatcaagctggctatcaaaacttgatgcggttgtcgacgatgaagcagacggcgacggatgcaggattgtcgctaacagccgtattaccttatttgaaccatttaatggtcttaaccccggctaaagacagtgaactagctgcgctgttgttacaaaacaccgctgagcgagctgctgattggattaccacgctgaggcaggcggtcgactctgctagcctttacttagggatttctttggatcaggcccctgcattgcgaacaacaatgacggcctttgcgcaacagcatcaattgccggtagttgcgttagatccagtcgactatgtccaagcaaaggattactttgccgtttcagttttgcgagcaatcgatcggggccaacagatcgaacagcccgaatcgttacaaggtatcgaaggcagtcactacttacggccggccaacaccgtaacggctgactatgagcaactgggattgacgacggcggtggcggctacggccgaaattgcggcacagtgtcaagttgaattacaatttcaacagccacagttgccgcaatttccaacgcccgctggacaaccagcgaatgtttatttacggcagttatgcacggctggtctaacggagcgattggcggcaataacgccgtcggttgatcagcaggcttaccaggaccgtttggatcacgaactgaccgtgatcgatcagatgggctttgatgattactttttgatcgtgtgggatgtcatgaattttgcgcatgaggcccagattacaactggacctgggcgaggttctgcagcaggctcattagttgcttatgcactcaatattacggatgtcgatcccttaaaatatgacttgctatttgaacgtttcttgaacgctaaacgggcgaatatgccagatattgacttggatattccagataatcgccgtgaacaggtacttaattatgttcatgataagtatggtcatgaccgcgtcgcacaaatcattacgtttgggaccttggcagcaaagcaagcattgcgcgatgttggccgtgtgtttggcctctcaacttacgagatgagtgactggagtgccgcaatcccaaaccaattgcatattacacttgaccaggcctaccagggctcacaacggttacaaaacctcgttgctgattcatctaaaaataaattattatttgaaacagctcgccgtttggaagggttgccacgacattattcaacacacgcggccggggtggtattaagccaaaaaccattaattcagatcgtaccactacaagcaggtagtgaaactatgatgatgacccagtatactaaggacactgttgaagcggttggtttgttaaagatggatttcttaggattacggaatttgtctttgatggcaagtgcgctacattatgtgcagcgtcaaactggcaggccactggctattactaaaatcgatttgaacgatccagcgaccctgaaattatttcaggcgggcgacacgaccggagtcttccaatttgaatcggcgggaattcgaaacgtgttacggcgtctgcacccggataactttgaattggtcgccgcggtcaatgcactttaccggccggggcccatggaaaatatcgaccattttattgcccgcaaacaaggccaagaaccggtcagttatccggcggaacaacttgcgcccatcttaggaccaacgtacggtattctggtctatcaagaacaagtcatgcaagtcgccgcggtcatgggcggttttacactaggtgaagccgacttattgcggcgggcgatgagcaagaaaaaacgtgctgtgattgataaaatgcggcaacaatttatcgctggtgcacaacagaatggttattccgaagcagttgcgacacaggtttatcaatatattgaacaatttgcgaactatggtttcaaccgctcacacgcgattgcctacagtaagatggcttttgaacttgcttacttgaaagtccattattccggagcgttctttacctcattgatgaattctgtgttgggcaatggaacgaagctgaaacagtatctagcggaagctcgtcagcaccaagtggcgattattcccccggatattaatcggagcggtcaatactttgattggaatggtcaagccattgtgtttggactcagctcaatcaaagggttgcgccgtgactttattgcgagtgtgttagacgagcggcaggcgaacggaccgtttaaaagtcttcagcagttcatgcaacggattgacgcgaagtggctcaaagccgatttgatggatgcactgatctatgcgggggcttttgaccactttggtttgaaccgtgcagagctactgaccagtgtgcctgaattgatgtcaagtgccgagttagccggtggcagtatgagtttatttgaatcattagcccctaagatcaaaaaacagccggagctttcgttaggtgagcgattggccaaagaagcggagtatcttggtgtgtacgtttcagggcaccctgtggaaacgtatgattggctcgcgcaacaacgacatacgcaattagtcagcacgctcacgagtgaacaaccggcacaaatactggtctatattactaaggtccgaacgattcggaccaaacgtggtcaaccaatggcatttgcaacgggaagtgatttgtccggcgaaattgacttgacgatttttcccaacacctatcaacggattcaggcggaattgaaaccagaagcaatcgtgttaattactggtaaggtcgagcaacagcgggatttgcaagtgatcgtaaacacctggcagttggcggaacaattacccaaaccaaccggccaactctttttgcggttgcaacctgagcaagcaacggcgactgtgcaaaaggaaattttaaggatcttaagtcaatatcgaggtcctaatccagttctaatttactcggtagcagcacatcgaacggttgaactaaattcacagtattgggtcgcagaaaatccagatttggttggagcgcttacaaccttattaggtcgcgataatgtggtgatgaagaacgctatcccttgatacgacggcgttttttaacgcatttaattttagaaaataacagacaatccacgtgaaaagtgttagaatcacttatggagttacgaactcaatttattgcctgaggtgaaaaaatgaaacgcattggtattttaaccagtggcggcgacgctcctggtatgaatgcggccgttcgtgcagttgctggtaaagcaatggctgaagggttggaagcatacggcatcaattacggctttgctggattagttgccggtgacattcacaaaatagaagcagccgacttagatggtgtgattcaacgcggcggaactttactatactccgcacgttatccagaatttgcccatgaagaaggtcaattaaaagggatcgaacaattgaagcggtttgggattgatgctttagttgttatcggtggcgacggttcttaccatggcgcattgcgcttaacggaacacggctacaacacgattggtcttccagggacgatcgataatgatattccttacacggacttcacaattggttttgacactgctgtcaacaccaacgtgcaagcccttgaccggatttatgatacggctcatagtcatgaccgtactttcgttgtggaagttatgggtcgtggcgctggtgacgtagccttatggtccggtgtttcaatcggcgcgactgctattgtggtccccgaagttgattgggacatggaagaaatcgccaacaagattaagcataaccgggccaatggtcatcggagcaacttaatcgtgttagccgaaggtgtgatgggtgcccaggagtttgttgagaagttatccgaatatggtgactttgatgctcgtgggaataccattgctcatatgcaacgtggtgggaatccaactgctaaagaccgtgtcatggccagcaagatgggtgcctacgctgtggaactcttgcttgccggcaagggtggcttagcggttgggattcaaaacaaccaattagtcaaccacaacatcttagatttatttgaatctaagcatgacgttgaagtgtcattagataagttgaatgaagaaatttcattcaagtaatcatggcatgttagttcttattttaatttgataaaaatgacgttaatgtctttttataaaaactttcaagggagagatttttcttatgaaaaaaaccaagattgtttcaacacttggtcctgccagcaccgatactgacactattgttaaattaatcgaagccggcgcaaatattttccgctttaacttttcacatggtgatcatgaagaacatttagatcgcttaaacaaagttcacgaagcagaaaagattacgggtaagaccgttggtatcatgcttgatactaagggtgctgaaattcggacgaccgttcaagctaacggaaaatctgaatacaagatcggtgacaaggttcgtatcaccatggatgattcattagatacgacccatgataagattgccgttacttacaagaacctctatgatgatgttcatgtaggtggccatgtcctctttgatgatggtttattagatatgaagatcgacgaaaaggacgaagctaaccgcgaattggttacaactgttcaaaacgccggcgttttaggctcacgtaagggtgttaacgctcctggcgtttcaatcaacttacctgggatcactgaaaaagactcaagtgatattcgctttggtttggatcatgaaatcaactacatcgctgcttcattcgttcgtaagccacaagatgtcttagacattcgtgaattacttgaagaaaagcacatggaacacgttcaaatcttccctaagatcgaatcacaagaaggtatcgacaacgccgatgaaattcttaaggtttgtgatggtttgatggttgctcgtggtgacatgggtgttgaaattcctgctgaaaatgtgccattggtacaaaagagtttaatcaagaagtgtaatgctttaggtatgcctgttattacggctactcaaatgttagactcaatgcaagaaaacccacgtcctactcgtgccgaagcttctgacgttgccaacgctgtctttgatggtactgacgcaacgatgctttctggtgaaagtgctaacggtctttaccctgttgaatctgttgccatgatggctaagattgacgaaaaggctgaaaacactttggctgaaaacggtacgttacaattaaaccgtttcgacaagactagtgttactgaaacaatcggtattgcgattgctcgggcagctaagaacttgaacattaagacgattgttgctgcgactgaatctggctacactgctaagatgatttcgaagtaccgtccaaatgctgatatcttagcaatcacttttgacgaacggacgcaacgtggcttaatggttaactggggtgttcaaccaatcgtggctgaaaaaccagaaaccactgatgacatgtttgatttagctgcttctaaggctgttgaacttggctttgccaaggaaggcgacttaatcttgatcactgccggtgtgccagttggcgaacgcggtacgactaacatcatgaagatccaattaattggttctaagttagctgatggtcaaggtgtcggtgatgaaacggttatcggtaaagccgtaatcgcaacgtctgctcaagaagctatcgacaaggccgttgaaggtggcgtcttagttactaagacgactgacaaagactacttaccagcaatcgaaaagtctagtgctttagttgttgaaaacggtggtttaacttcacacgctgctgttgttggtatctcaatgggaattcctgttatcgttggtgttaaggacgctactagtgttattgctgatggtcaattgatcacagttgattcacgtcgtggccttgtataccgcggtgcttcaaacgccctttaagatcaaatctaatttgatattgaaaagtcgtcgctttgcggcggctttttatattacataaagtgcttcactcccagttaaattagtatgaaacatggttaaaaggtgccaaatcgtcaacgtcaaatgatccagcttaagcccgctggaaaaagatctacttagcggaaatttacttagctagcggcgtcctataccgacttccaggcatttcggccaattgctggaacgcggtggacacagatttaagccgaagaccacgtcttaaatactggtcttccactaaccaagccaaaaacgcttactaagtggaatttcaccgctgagcattggccgaaacgccttccagtcgtgatagtatgcgaatggccgacatgggtggacccagcattgaacgaattagatgttgctattttaaaacagcgattttatcatacaacagttagtttgataatataattgtgattgtacgattatttctaattccaccgtattagtactgaggtgtccaaaacaattgagacagcattaacgcatgttcaaaattctaagtagtaaacccgttcagcgacaagttaggtggtcgttcatcagccattcgactggcttaccgactggaggggttgggtgacaatgctcagtagccaaattattcttggctggaagtgggttgcttccggcctagaataagactcgtatttgagattgcgcagtgggttgctgcgtgagctcaaatcgacgtcggctacgttccggcaattgtcacccagccccgtaagtcggaataggacgaaccttgctgacgagctggaatccaaacgatttggcaccttttaaccctgttcccgcctaaattaaagaacaggaatcggttattgatcagggggggatagtgaaattggtgagtaacgaccaacacccctcgtaattcgggccattttcagttacaattgataacacgtgaggtgtcgtatggaaagttggttatttttattagcgattttagtggtggcatggttaggaaaaaatcagtccttacaaattgcgaccgtggttgtgttgcttatcaaattgattcctaatacgagtaaattgctgacgacgattggtcagaagggaatcaattggggtgtgacggtgattaccgtcgcaattttaattccgattgcgactggtcagattggatttcgggacctttggcatgcgtttaagtcgccagttggctggattgcggttgcatgtggagtgttggtttcagtgctctcatttcacggtgtcgggcttttgtcagcgacaccagagattaccgtggcattagtattcgggaccattatgggtgttgttttgctcaagggaatcgcggccgggccaattattgcggctggtataacctattgcattattcaagtcttgcatttgagcttacagtaatttaaaagaaccatccgttgatatttatagacggatatattagaggagttatcacatggatagtattattggaacagtggttacggcgaaggtaaccgatgaaaacgatgaagcatgcttcgtacagattgatggacagacgttgtgggtcgataaaactgaaccagagaagccattgcacattggcgggctttacgaaggttttgtttatgagaatgaagaccatcatctgcagatgacgcggttcgtcccggaaatttcgtttgatcactttgtgtggggaacggttgtccggacgcggcatgatctgggtgtctttgtcgatgttggtttaccaaataaggacttggtggtgtcattagacgaattaccgaccatcagtcgactatggcctaaaaaagatgatcgtttatacgttaagttagcccgtgacaataagcaacggctatgggcgacgctggcagaattgacggattttgaagcaattgccaagccatatgaccgggctcaagttaagaatacggataccatggcgaccgtttttcgtttgaagatggccggtacgtcggttattacagatgacaatcatctgggctttgttcatccgtcagaacgtgaacaggaaccacgcatggggcaacacgtcaaggcgcgggtcattggtttcttgcgcgatggtgaattgaatttgtccttgaagccgcggggatacgaagaaattggcgatgatgcccaaatgttattagcagcattgcaacatcaagctgaccacgcgctaccattttgggataagagtgatcccgatgatattcggaattactttggtatcagcaaatcacaatttaagcgcgctgtgggtaatctcttgaagcaacgcttgatcagtcaacaaccaggcgagatcaagttactggaaaatgcggatgagcaagccgacgattgatcaaaaaatgcaggaccagcttgctgattacctgcattttttgcgtgttgaacgggggttagttgagaatacgattaagagttattctcaggacctgactacgtttagcgaatacttgatgagtcagcaaatcacggactatcgggtggttgatcggtacgtcctattgaattatttacagtatctagatgaggctggtaaatcgcgaaatacaatcattcacagtgtttctagtttacgtaagttttttcaatatttagcacagatgcacgctatcgatactgatccgatgctaaaaatcgacacgcctaagcgggcgcagcatttaccgcaagtattgtcaccacgcgaggtcgaacggttgctagcggtgcccaagttgaataccccgttaggattacgagaccgaactctgttagaagtgatgtatgcgaccggtctgcgagtcagcgagacaattaatttaacgatggatgatctgcacttagacttgggattgattcaaacaatcggtaagggtgataaagagcggatcattcctatcggtgatgttgccattgattttattacccgttatttaaaaacggctcggcccaaactcgtctctgccaaacgccggaatagctatttgtttattaataatcacggtggtaaattaagtcggcaaggggtttggaaaaatctgaaggcagaagtcaaggcggctggcatcgaaaaaaacgtgacgccgcatacgttgcgccactcgtttgcgactcacatcttagaaaatggtgcggacttgcgtgtcgttcaggagcttttagggcatgccgatatttcgacgactcaaatttatacgcatatttcgaaaaaacgcctagctgaggtttataataaatatcatccgcgggcatagatgcggtgcggaatcaagcagtcaagggaggcaataccgtgctcgttaaatatcggaaggattatgaaaaggtagcaatggggctactgtcatttattccagattttaaggacctaattcatctacaaactgagatgcagtggtatcagtcaacggaagaccaccaactattactatggcggcaaggtgacggcgatttctgtggtattatcggcattgaagtcggcagtgactttattctactgcatcacgattcattatcacccgaggaacggacggcggccaaccagtatcaaatgttggatgagttggccgcgttatatcccaagcaacgggtcatgggaactttagaaatggcgccgatcattggcgcgtgggagcgtaatcgtgacaaacaaccaacaacaaccaatcaccattaagatttcggagtttgaggggccactcgacttgctgttgcacctcatccgccaaaacaagatggatatttatgatattccaattgcggcaattacgcagcagtatttggattacttacactctatgcgagcgctaaaattagatattgctggtgattatttggttatggctgcgactttgatgacgatcaagagccgtttcttattgccacagcctgaaccagatgagatggacgaagataatgaggacgatgatcctcgtgactcacttgtagctgaactgttggcttacaaggtttatcaggaagccgctggtgaattgcgagaaaaagaacaggcgcgccatcagcattttacgcgtgaagcgatgttagtaccagctgatctgagtgcgcccaagctgactgcggggattacattagatgatctgcaagcggcttttcggcaattagtggctaaacggcggcgggtacggccactaacgaaaacggttgtggctgaaaccatcaacattgatgagcggatgacacaaattacgacgcaattgcaacatcaaccacaaggactggattttgccgacctatttacggttagtgccagcgatgaaatgttagtgacaacctttatggctgtgttagaattaaccaagcaggatcaagtggcgctgcagcaagctgagccactgagtccgattcatttatatttacgacaggatgaacagcatgacgaacattgaacaaattgaaggactattatttgtggctggcgatgagggcatcacggtcgccgaaatcgagcacgccacggggtttgctaagccggcgattacaacgatgctcacacaactggccacgaagtatcaagccgacccagacagtgccctaatgatcttatcaacggcgaatacttaccggctagcaactaaggccgcggtggcgccggtgttaaagcgctactttgaagcaccactcaccacgagtttgtcgcaagcatcgttggaagtgttagcaatcattgcgtatcggcaacccttgacgcggattgaaattgatgagattcgtggcgtacacagtgggtcaacgattcaaaagctggttttgcgacaactagttactgagacggggcgtttaagtgagccgggacgaccaattttatacggaacgacggaactgttcttagattattttgggctaaagtctttggatgacttaccagcgattgacttagctgctttaagtgacgctgagcatccggcaccagagacagacctctttttaaatgcatttcaggataaattacaagcagaacgtgaggatgaataatggcagaacgattacaaaaggtaatggcggaagcgggcatcgcttcgcggcgtaaatcagaagtgttgatcacgtctggtcacgttaaggtgaatgggaagacggtcaccacgctcggtgtaaaggttgaacctagtgaccatgtcgaggttgatggcgtgccattgaatgcagaaaaactcgtgtattatttattttataagccgcggggggtcgttacaactgttcatgatgagaagggccgtaaaacggtattagacttctttgaagacgtaccggaacgaatctatccggtgggacgtttggattacgatacttcaggtttgttgatcatgacaaatgatggggctctcgctaatcggctaactcatccgaagtacgaagtcaaaaaaacttatttggccaaagttgaaggggtaccaaccaatgctgatctcaagcaattgcgcttgggtgttgaaatcgatggccgtaagacagctccagcgaagtcgaacttgttagatagtgatcacaagaagaataatgcgctggtccaactaacgattcacgagggtcataaccaccaggtgaaaaagatgttggctgcagtgggtcacccagtgactaagttgaaacgtgaacgttatggggttctcgatttgcaaagtttacaaccgggcgaataccgtaaattgaagccgattgaaattagtaagttaaaaggtgaacgatagcgcttgcatttttgaatgaaagccgttaaaatgaatttgtaaaaataaatattggttcatcttcagggcagggtgtgattcccgaccggcggtaataacccgcgacctatgcgtgtgcatagtgatttggtgcaattccaaagtcgacagtaaagtctggtataaagaagatcgagcttatttgccaagcgttgcaagtaagtccgcccccagatgacagttagtgtgatcgggcggacttttttagttgaacaaatggtaatgcggttcattgaagatgacccataggagggtgcgttatgcaacatacaacgttacaccgactagtgggcatagccttactcggtgccattgcgtatattttaatgttactggagtttccgattttaccggtagcgccatggatgaagattgatttttcggatattccaattctgattggtctctttctctttggtgtcgggggcgcgtttgtcatcactatcatcaaactgctcctacattcagccatgatgggctttgccatctatgacttaatcggttcttttgctagttttttaggtacggcagtattgattttagcatttgcattagtacttcgttactatcggggcaatcccaagtggcggatgcctgtggcgattgtggtcgccacaatcggcctggtggtgattgaatcgttggctaacttaacgtttgttctgccattctatttgcaagtaatgggtatgaagctcagcatgtcgctgaatacagtggtgttagtggcagtcattccatttaacttgatcaagggattgctagtgggtaacgtcttctggctggtctatcagcgattagctaagtggttaggcaaccataatcagcttatgagccgaatttaatttaagtcgttaaaataatgtgggtggtcactaattgcgtaactgcagggtgactgcctttttatattggtgccaccgtgatattcttaaagacgcacactgccggttggcggatggttatccatgagctttaatgtggcagtaagttgataaatttgaagcttcgatcaaggcttagaaagattaaaaagctgtcggtcgctatgctgtgtcgcgggtcactgtcagcgacactgacgcacgtaaatttgggctgatcacgacttaatttaaaaactggcacatttagtgcgcaattaacaatcacaacagcaagacttaagggaggccttagcgtgtttacagactacgttttattgttattcagtacaacgccgcgacgagcaaagggcctattcaatgtcttgcgcggtcgccgtacggtctccacgctttttgcggggttaactgccggctacttggatttgctcgacagttgccacgaggttcccttggaagatttcatggcagcaactgcggctttgactgaaaacggtcaattgacgagtacggccacgggatgctggcaattaacgcagacgggggaacaacggcaagccaaactccggcagactttatacatgccccaaaattttgaagtgtttcaaaccactgatgtccgccgatttagaatcgtcagtcagctagccctacaagtcgtttccgaactcgtacatcataatcgccattactatccggtgacgactgatccggggattcaggcccaggtcaaacaatggttacgtcagcagtcgaaggtggaacttggcgagcaaattcatgcggccttgactgccttcttgacgagtttggcagacccagagttaccaacggtgtttgttcaaggcataacggggtatcaagaaccgggactgactaatgagcaattagcggcacaattaggtcggcaaccctgggaggcgagcttgatgcacacggacgtgatatgccaatggattgcttggattcagcgacacccgcgtgatccatttgcccagttgttgtcagtgctcactcaagcgagtgccatcagtcaaagcgctgagcaaacttaccaagctttcttgaagacccagcaacttgcagcaattgcgcagacgcggcacttaaagatgagtacggtacgggagcacttgttggaggtggcgatttggtcgcctgattttccgtttgaaatggtgttgaatcatgaattaactcagcagttgaccaccatctttgcagcccagtccgacattgcaaactggtcattccaagaggcccaagctgcgctacccacgctagatttttttgaatttcggctatttcagattatgaggtgtcagcatgtcagaagatgaattatatgagctgttgaaaacgaaatatggcttcgatgaatttcgccccgggcagctagccgtcattcagaaattattagcaggtcaagatgtcttggcagtgttaccaactgggaccggcaaatcattgatctatcaactcgtcgggaccgcactacccgggctagttgtggtggtttcaccgctgatttccttgatgcaagatcaggtggctcgcttaaactatcaaggcgaaaagcaagttgctgctttgacctcccaactagattatggtgctcgccagtatctgctgaatcatttaggacagcttaaattcttgttcatttcgccggaaatgttgggtcaagacattattcaaacagcgctgatgcaagtgcaactggcgttattagttatcgacgaggcccactgcatttcaacttggggaccagattttcgccctgactaccgtcgcctgggtcaaattcgacaacggttacaggcaccgacaacgctaatgctcacggcaacggctacacaacgcgttcgacaagatattttgacacaattaaccgttccagatgcccagcaagtcttatattcggttaatcgtcctaatatttacttagcagtcgaacaggtcaatgatgaagctagtaaacgcgcgaccttgcaacatttagtgacgagtgcgcgcggaccagtcatcgtttactttacttccaagcggcaaactgatttgatagcggaatggctacgaacgacaaccacgttaagggtcgcggcttatcatgccggcttagcgaccgatgaccgtttcaagatccagcagcagttcatggcaggacaattggatgtgatctgtgctacatctgcttttggaatgggtatcaacaaagctgatattcgcttagtgatccactatcatttaccgacgactttggccgactacgttcaagaaattgggcgcgcaggtcgtgatggtcagcaggcgatggcgattatgttgtacgcaccaggtgacgaaaacctggtgcggaatttgaacgaattgacggctgcgactcccaatgaaattcagcaagattatagccgttatcaagcgcagcagccaccgactgatgatcgtagtaaggttttgcagtcatactggctacaaggaactcccccaacgaccgtggcaacgatttttgctgatcgccaagcagctaaggaacgtgaattgcgggcgctcatgggttacgtccaaacgacaacttgtcatcggaccgtgatgttaacttactttggtgagccagctgttacccatacagatcagtgttgtcagttggctggtgaaccactaccgctggctgcgttagggttgatggcgacgcatgatgagtcaacagccacgataatgtcgtgggatcagcacttagctcaattgtttttaccaaattcttaaagaaatcgattccgggttatgttacaatattggttgaaagttttttgaggaggaacaccctatgagtcaaaaaaatgataatgacaaatcccaagcggataagccgtgggacaaaacttttgaagacgatcgggatgactcgggcaatttatcgcgaactcaaaaacgaaaacaagacagtagcaactctacgctaacgaccgtgttagtcgtactaatattgttgcttgctttggcaccaattggttatttcttggtgaaaaagaattcgcttaataatccgcaacagactgaacaagttgctagttcgagctcgaagaagtcatcggccagtgttgctgccagtaagtcatcgactgctgctagcaagaagaaggcggccgcatcgtcgaaaaaggcggctgctaaaagtagtagcctagccttggctagctctaaagctgccagttccaaggctgctagttctactgctgccagctcggaagaaagtgcgagtactgacgacagcagcgctagcagtagtagtagctcctcagaatcatcttcagggactaagtacgtcacggtagaagccggtcaaggggtctatcgggtcgctacgaatgctggaatctcagtggataagctattggaattaaatgggttatcatctgatgcaacgatttcggctggtcaacggttacgtgtccgttaatacacgattttttcagattgtgaggggttagttaatggctaagcaagcattacaggtggccatcgatggtccggcttcagctggcaagagtaccgtagccaaactcgttgcaaaacggtttggctatatttatgtggatactggtgccatgtatcgggcagtcacgtactgggcaatgcaacagcacgttgatttagcagacgaagcggctgtgattacggcaatgaagtcgctcaagatcagttttaaacccggcgagccggatcaactggtttttgctaatcaggaagatattacggcggcgatacgccaaccagacgtgacgaataacgtctcgacgattgcggcgttaccacaggtgcgtacgattttaactgagcaacagcgagagatggccaatgcaggtgggatcgtgatggacggtcgtgatatcgggacaacggtattgccaaatgctgaagttaagatctttttagttgcttcagcggctgaacgggctaagcgtcgatacgccgaaaatgtaaaaaaagggatcgacacgcccttggctcagctacaggctgagattgaattacgtgaccacaaagattcaacgcgtaaagtgtcaccattaacacaagcaacggacgccacacttgttgatacgacgccaatgtcaatcgatgaagttgttgctgccattgccaaaattattacaaaaaaacaaagttcaacaatctaattgcattaacttaatgcttttagctagcttttcattgcattttcagctatgatataggttagagttattgttgacaggaggaaatttgcatgagtgaaaacgaaaacagccaagagaaaaatgaacttttagacgctttaaacagcgttgaagaagtaaacgtcggtgacgttgttaagggtgaagtcttagcaatcgacgacgacaaacaagtaattgttggtatccaaggtaccggtgttgaaggggtcgttcctttgaaggaactctcaacacaacgggttgacgatgtcaacgaagccgctaaagtcggtgatgtattagacttggttgtcatttctcgaattggcagcgacaaggaaaacggcagttatttactgtcacatcgtcggttagaagctcgcaaagtttgggacgatgttgaaaaagaatacgaagcaggtcatacgattaaagctccggtaacgcaagttgttaagggcgggttagtcgttgacgctggtgttcgtggcttcatccctgcctcaatgattgatgatcattatgttgaagacttaaatgcctataaaggccaagaacttgaacttaagattattgaaattgaacctagcgaaaatcgcttgatcttgtcacaccgtgccgttgttgaaaagcaacgcgaagcacagcgtgaagaagctttgaagaccttacaagctggtgatgtcgttgaaggtaaagttgctcgtttgacgaacttcggtgcctttgttgacctcggcggaattgatggtttggttcacgtttcagaaatctcatacgaacgggttgaaaagcctgctgatgtattgaaggttggtcaagaagtcacggttaagattttatccgttgatgctgaccgcgaacgggtttcattatcaatcaaagcaaccttaccagaaccttgggatggtattgaagaaaaagcaccacaaggggctgtacttgatggtaaagttaagcgtttgacgagttttggtgcctttgtggaagtcttccctggtgttgaagggttagttcacatttcacaaatctcacaccaacacattgcaacaccaaacgatgtcttaaaagttggtcaagaaatcaaagtcaaagtcttagacgttcgtccagacgaaaagcggttagctttatcaattaaagctttggaagaaaagccacaaactgctgacgatgacaacgaaagtcaaccagaacgtcggagtaacaataaccgtcgtcgtaacaacaaccgggacaaccggactgctagcgaacgttcaacggctaatgctcctgaagaatcaactggtttcactttaggtgatttgatcggtgacgaattgaagaatgctgaaagcaacaatgatgaaaactaatcattgattgattaaaaatacccttcaagcttgccttgaaggatatttttttaggaacagattagttggtgttaccaattaatttgagactcgtagcaggaacctgacgctacgagggtaaaggaggaattaatatggcaaaaccagtcgtcgccattgttgggcgaccaaacgttggtaaatccacgatttttaatcggattgcgggtgatcggatctcgattgttgaagatacaccgggtgtgacccgtgaccggatttacgccaacagtgaatggcttggtcaagaattcagtttgatcgatacgggtgggatcgatatcgaagatgccccattcattaaacagatcacacagcaagccgaaattgcaatcgatgaagctgatgtcattatttatttagttagcatcaaagaaggcgtcacggacgctgatgaacacgttgcccaaatcttgtaccggtcgaacaaaccggtcgtgctgggtgttaataaagtcgataaccctgaacttcggagtgaagtctatgacttttattcccttggctttggcgatccgtaccctatctcaggtgcgcatggactcggacttggggacttgctcgatgctgttatcaaaaactttcctgaaaaaagtggggaggacgaaccggggacgattcgtttcagtttgattggccgcccgaacgtgggtaagtcatcaattgtcaacgccttgctgggtgaagaccgggtcatcgtttctgacgtggccgggacaacccgggatgccattgataccaagtttactgatcaggatggtgaccggtttgtgatggtcgatacggccggtatccgtaaaaaaggaaaagtttacgaaaataccgagcgttatagcgttatgcgtgcgctcaaggcaatcgataatagtgacgtggcactctttgtcatcaatggtgaagaaggcattcgtgagcaggataagcgggttgctggttatgcgcatgaagcgggtaagggtattatcatcgtggtcaataagtgggatctggttaagaaagacaaccacaccatgcaagaattcgaagcatatattcgtgatcagttcgtttacttgagctatgcgccgattatttttgtctctgctaagactaatcaacgtttggagcaactacccgcgttgattaagaaagtcaatatgaaccatatgcggcggattcagtcgtccgttttaaatgacgttattatggatgcgattgcgatgaatccgacaccgagtgacaatggtaagcggctacgggtttactatgccactcaggtggcgattcaacccccaacttttgtggtcttcgtgaatgaccctgatatgatgcacttttcatatgaacgcttccttgaaaatcaaattcggaatgcctttgattttagtggtacgccgatccacatgatcgaacggcgacgtaagtaggctaaagcgcgtaaaatcagcattttagcacattatttgattgatgtaaacgattatcatctttttgcgctattttcgctgaaaaggctaaaaaagcttgctattacagcattcctatgctatctttgatgaagaaatgatgcttgttatcgtttctctcatttttggaccactcaaaaatgatcatctggatcaacgatgttaaaaagcacggcgatccttcactctgtaacggggaggtgaatcaaacatggcaaacaaagctgaattagttaacaacgttgctgcggcaactaacttaacgaagaaagacgcaactgctgcagttgacgcagtctttgcatcaatccaagacactcttgcaaagggtgaaaaagttcaactgatcggatttggtaactttgaagtacgtgaacgtgcagctcgtaagggccgtaacccacaaactggtgacgaaatccaaattcctgcaagcaaagtacctgcatttaagccagggaaagctttaaaggacgcagttaaataatgcatatcagttaatgaaatgcaaacatgaaagccagtatagcgaccgttatactggcttttttgctgtcgtctgcggtatgatagactgtcagttcaagtgattaacagctggtatcccatgtgacgatatcaggctgactattgaaataaatgatgaaaccatggcgactaaatgaagtcgtttcttagtggtttaaaggatgggtgtaatgagttattcagaaaaaatgctcgcagcactatcaaacgggcaaattgacacggccaaaaagcactttgcatgggccttacgtaaggatgatgaccagacgctgtatagtctggctgaagaattgtacggtttgggctttttaaagcaagcggaacggacttataagaagttactggctaagtatccggatgaggacgacttacggacaagtctggctgatattgccatcgatgaggacgatacggacctggcactcgactatttacaacaagttaagccagactcaccggcatacgttcaagcgttgttagttgaggccgatctataccagacccaagagttatttgaagtcagtgagcaaaaactcaaggaagcctatcagctggcaccggacgaaccagttgtcgaatttgcgctcgcagaattttacttcttgattcgtaactacggtcaggcgactcgcttctacttggacttgatcaagcagggacaactagagatctctaaagttaacttagttgaacgactaggggtggcttatgctgagtccgggcgctttgagcaggcggtgggttatttagaacaaatcaagcctgccaagctcacgccggacagccagtttgaattaggcttcacttatttgcaattaaacgaacctcagaaagctgttgatatcttcgacaaactgcgggaacaagacaatcagtatgcgtccctgtacccatacttggcccaggcccaagagcaacttcatcaactggacaaggcgttattgaccttacaagaaggtttagcggtcgaccagtacaatgagcagctgtacttgcaaactgcccgcttagccttgaaattagacgatcaggaattagctgaaaagtatttgcgggaaggcttgagtattgaccctgataacttgactacggtattggaactgtctaatttgttagttcagcgggaacgttatcaagacaatatcgacttgttagatcaatatttgcaaagtaatgagtttgatccgcagttctactggaacttggcaatctctaatgaccggctcgatcattttcaggcggctaaggataattacgaagcggcttatccgttctttgaacataacaaggatttccttaagccagcaatttatttcttccgcgaagcaggaatggccgacagtgccgtggcagcgttgcggaattatctaacgattgaaccagatgatggtgaaatggttgcgatgctagaagactacgaggatcagggctactaggcctttagttcttcaccatttgctgagaggcttcatttctaaagttattgaaaccactttcaattttggtaaaatgaacgtataccaaatttaagtgaggcgtttactatcgtgaaagtagctattattgccaccgatttagatggcacgtttttgagagacgaccatcagtttgatcaccatcggtttcaggcccagttggatcaaatgaatgctcagggccagcactttgttgtggcgagcggcaatcagctgcaacattgtattgatgtttttgacgggatcaatggtgaattgacgtatgtggctgaaaatggcgggttagtcattgataatcacggcaacgtgttggctgaaagcctgattgagccggcgctttatcaggaactgttagtttacgtggcgactgaaccagcactagctggtgctgagatctcggtctccggcaagcaaggggcatatattcggccccaagatgacagtccgatcatgcggtactatttgagccggctgcaagtggtgccatcgctatcagcaattgatgaccatatctataaagcgacttttagttggcaagccacggatgctgatgcgcacgccgatttgatcaatcagcaatttgctggccggttacgtgcaactgtcagcggtggtaatgggcttgacgtcattccaccacatgttaacaaggcaaccgggcttgcttatctccagcagcattggcacgttgtccctagtcaaacggccgcgttcggtgataacggtaatgatcttgaaatgctacgggaggccgattacagttttgcgatgcaaaatgcgattgcacctgtcaaagagatggctacgtaccttacgtcacatgacaataatcatgatggggtgttagcgacgattgacacgttaatttagcgtcaccaggtgttgttgacggccgaaatatataagcaaatagtgttcgaccgagcgggactacgctttgagtcagacactattttttattcatatcagtgttataggacggacgtggctcgtctcacaaagtagcaagttaattagcgggaccgttttagtcattgggtacgaacaaaatgggggtagtttaacagtttaaacaggttcggcgaggattctcctgcctaatttggcaattgtctgctaaaatataattagcttaatcttgaggaggaatttattgtggtaaaagtaattgttgccggctataagggtcggatgggtagtacggctgctcagatggtcattgataatcctgattttgaattggttggggtctatgacgcgcgcagtggagaacaaaatctaggtgaggacgaccgctttaagggtcaagacgtgccagcttttcatgatttagaccaaattaagacggatgccacggtctggatcgactttacgattccaaccgccgtttatgaaaatgcaaagtttgcacttaaccatggtatttcgcctgttattgggactactgggatgaccgatgaacaagttgccgagttgcaaaaattagcaaaggacaagcaagtgggcggcctcattgcgcctaactttgggatcagtgccgtcttactcatgcaatttgcccaacaagcagcgaagtacttcccagatgttgaaattatcgagatgcatcatgacgataagattgactcgccaagtggtactgctatcagtactgctaagaagattgctgaagttcggcaaccaaaggaacaaggtaatcctgacgcaactgaaactctacctggcgcacgtggtgccgaatatgaagggatgcggattcacgcggttcggttacctggactagtggcgcacgaagaggtcatgtttggcggccctggtgaagggttaacgattcgccaagattcctttgaccggatctcatttatgactggtgtcaaagtggcggttgaaaaagttaaccagtatcacgaactctttgttggtttggagcacttactatgattttgacgcagttgccagctgagtttcaagcagctaagccgattattgagacgatcgaagcggccggctatgaggcgtactttgttggtgggtgtgttcgcgatacgattttggggaagcccctacatgacgtcgatattgcgaccagcgcgtttccggctgaggtcaaacaattatttaaacggacggttgatacgggaatcgagcacggaacggtgatgattttagatcacggcaatggttatgaaacgacgacgtttcggactgaatctggttaccaagattttcgccgccctgatcaggttacgttcgtccgatcattgaaagaggacctgaagcgccgggatttcacaatcaacgccttagccatgactgctaacggtgaagtgattgatctgtttgacgggttagcagatatggaacaaggaatcttacgcgccgttggagtggctgaagaacggtttcacgaagatgcgctgcggatgatgcgtgccgttcggtttgcaagtcagttaggctttaccattgaatcgcagaccgaacaagcgattgccgataatgcggcgttgttggcgaaaattgccgtggaacggacgcgtgtcgagtgggagaagctgctgatggggcagcacccagttgctggtttgaccggcttgctgaccactgacttgtatcgttatatgcccgcaatggctgatcaagaagcgatgttgcggcagttaatggcacttccagcttggcatttgccgagtattgaaagtacttggaccttgcttagctggaccatgcaacggactgacgaagcggctgttcgccagttgttaaagacgtggaagacgagcaatgagctgattaatcacgtgacggccgctattaaagcgctgatggcgttaaaacacaacggtcagttaactgcgcaggagaacttttatacgggcttagaggcgctgaaaacggctaatcaggtggctacgattttaggctttggccaggaccaagcacaattggtgcaagcttatgctagcttaccaatccatgacaagcatgaattggccattaacggtggcgatttattgaaagctaaattggtgacgcctgggccaatgatgggtcaaattctagcggcttgcttacaggccgtggtgatgaaacaggtcccaaatcagcaggatgctttgcttgattttgcaaggatggtagcggattcaaaaaaccattgatattttctatgaatctgttacgattaaagtgaaactaattcaatgaggtgatttgaatggaacgagcattagaagcattgaaatttcattttcggaatggtgacacttggacagttcatcatcaagatatctctgacctgtggatcggccgggtaacgacgagttacggtcgaattaagggtggccatatgaccatcattcatccttgtaaatcatttaaggctgaatttaaacctgacgctgatgcgatcgatccggacacgacccaactatcatccgtgacaagtgggatgtttgaacgggtgacgcattatcaagacattgaaaaaattgacatcctgtttggcgacgaacgtggtagtgaacaaatttacttgccattcaagccacgggatgcggatggtatcgacaacatttatcagacgagctcattagccagcgatggaaaattacacttagtcgttgatgatgaacggaccgtctttgatgtttatggtgatcataactaataaggtgttgccaaacaactcttggggccgagtgagcctcaggagtttttttgtgactcacgacccaatcgaatcgatgatcgttaggaaatattaacgtttgcgcgtttgtcagttgtgttttaagccgattctagctaagatagaacttaatgatgtaaaaaaagggtggatcgtaacaatgcaaactttaagagcagaaaatctgacccgaacttatggtgagaagacgttatttcacgatatttcatttattgtgaatgaacatgaccggattggtgtcattggcgttaacgggtccgggaaaacgaatttattagacgtattagccgggattacggcaccggaagccggtcaactggtgatgcccaaaaattatacgattggttatttaaagcaaaagccggaacttgaccagaatctgacagtcattgatgccgttttggccggtagtcagcaagtctttcgaacgattcgccactacgagcaaacgttggccgcttatgctgatcatcccgaagaccaagcgacccaaaaagcttacgtggccgctgaggatcgaatgaaccaagaagatgcttggacggctgaaagtgatgtcaaaacgattttgacacaactgcacattaccgacctgacgcagaccgtcagtcagatgtcggggggccaacagaagcgggtgggcctggcgcaagtgttgattcaatcaccggatcttttattactagacgaaccgaccaaccatcttgattttgactcaattgagtggttagaaagctatttagctagttataagggtgctttgattgtcgtgacccatgaccggtatttcttggatcaagtcgccaaccagatgtttgaattgtcatttggcgagctgcataagtatacgggaaattaccaagatttcgtgcaagcgaaagccgaacgggtcgcccgtgacgtgttagctgaacataagcaacagcagctgtacaaaaaggaactggcttggatgcgtgcgggagcacccgcgcgtagcacgaagcaacaggggcgcatcaatcggttcaatgatttgaaggataatttgaatacgctccaagttgataacgatgttgatatttcgctcggtcagcagcgtttgggtaagaaagtgatcgagttaaaggacgcgagcttgcagtttgatcggcaaaccatcctggatcacttttcgatgttgatccaagccaatgaccgcatcggtatcactggaatcaacggtgccgggaaatctagtttattgaatgtgattgcgggtcgactgccacttgatagtgggaccgtgacgatcggtgagaccgtcaagatggcctattatactcaacagaccgaaccgattccgggcgacaagcgcatcattaattacttgcaagatgtcggtgagacggtcttgaataagcagggcgagcatgtttcagtgactgagttactagaagagtttctgttcccacgttcgatgcacggcacgctgattcgcaagttatctgggggcgaacagcgccggctatacttactgaagttgttgatgcaacagccgaacgtcctcttattggacgaaccgactaatgatttggatattggtacgttaacggtgttggagaactacctcgatgattttgccgggaccgtcatcactgtttcccatgaccgctattttttggacaaggtcggcacgaaactactgatttttgatggtcaggggcatattgaacgctattctggccgtttctccagttatttgaaggatcaaaaagacgcggccaaggccactgcgacaaaaactacggctaagccggtcacggatgactcgaccgcaccattggccaagaaagccaaagtcaagctgacttacgcggaacagctcgaatacgacaagatcgaaggggttatcgagcaattggatagccataagagtgagatcgaagcggcgatggctgccaatgccagtgattatggcaagttggctgatttgcaaaaagaattgactaagacggaacaaacgattgatgagaagatggatcgctgggactacctcagccagtatgcagaagcctgaaaggatgatcgcatgttagaagatagttatttacaactcgcgcgcaccattttagaacacggcacgtataaggatgaccgtaccggcacgggaacatacagtgtgtttggttaccagatgcgctttgacctgagtcaaggcttcccgttattgacgaccaaaaaagttccctttggactgatcaagagcgaattactatggtttttgcatggtgatacgaatattcagtatttattgcaacatcacaaccatatctgggacgaatgggcgttcaaaaattgggttacgagtgccgattatgacggccctgatatgacgaattttgaacaccgccggctagatgatcctgactttgcgccgatttatcaagctcagatgcagacctttgatgaccagatcttgacagacgacgcgtttgcggccaagtatggtaatttgggtgacgtttacggtgcgcaatggcgtcactggcaaacgcgtcagggaaagacgatcgatcaaattgccaatgtgattgaaatgatcaagacgcatccggattcgcggcggttaatcgtttccgcttggaatccagaagatgtgccgaacatggcgttaccaccgtgtcatactctgtttcaattctatgtcgcggatggtaagctctcttgccaactctaccaacgttcaggcgatgtcttcctaggtgtgccattcaatattgcgagttatgcgttactaacacatctgattgctaaggagacgggcctagcagtgggcgagttcgtgcatacgttgggtgacgcgcacatttatactaaccatgtggaacaagttaaaacgcagttgacccggcaacctcggccagcaccccagctgactttaagtggggctcatgacagtatttttgattaccaaatgagtgacatcaagctcagtggttatgatcccgcaccggcaatcaaagcgccggtcgcgatttaggaggccgcaatgattgcattgatatgggcagaagatcaaaatggcctgattggcaaccagggccagcttccctggcatttaccagcagatatgcagcggttcaaagcgctgacgaccggacaccatgtcgtgatggggcgcaagacttttgcgggctttaaacgcccgctcccacggcggaccaattgggtgctctcacgtcagtctgatttaaagttgccaccggaagtccatcaactagcagatgtgtcggcgatccaaacactcgcggctgcccatccggatgaaccgatttttgtcattggtggtgcggtggtgtttgaagccgtgttaccggtggccgattatttatatcggacgcgtatcaacgcaaggtttgatggtgatacttggatgccggccgtggattacacgcagtggcagctggtgagccaacaaattgggacggtggatgagaaaaatcaatatccgtacgaatttgatgatttccgccgtcgttaattcagtggcaaccgtgaaactcaggcagatttctgctatactgaaagcattaattttattgtaacgatcgtttaaacgttacaagtataagaaagcgtggcaaagtatgacgaaaatcaagattgtgaccgattcttcggcaaatttgacggatgccgaggtaaaaaaatacgatattaccgtgattccgttgactgtcatgatcgatggcaccatttacgtggaagatgaaacgattacgcgtgaagaatttattgacaagatggcaacggctaaatctttaccaaagacgagccaaccggcactcggaacgttcattgaaacgtttgataagttaggtgcggatggcgcgagtgtgatttgtatcaatatgctcgaagccatttcaggaacagtgcacacggcggaacaagcggcttcgattacgaagaccgatgtcaccgtgatcgacgctcggacgaccgaccgtgcgatggcctttcaagttttgactgctgctaagttagcccagagtggtgctgacaaacaggcggtcatcgatcagattcatgcgactcaggcccatacaaagctattcatgggcgtaatgaccctgaataacctcgttgctggtggtcgaatcagtcgtctgacgggggcaatcagtacgctactgaatgttaagattgccttggaagttgatgacggcaccctagatgtgaagatgaaggggcgcggtgttaaggcgattaataagttttttgataaggttctcgacgatattattgcaacgccgaacgtcgccgaagttgcaatctctcacgttggcgccacggagcgcgtggaagaatatcgggcgcgcctacaagcggctttaccaagtctcaagatcagtgttcaaccaacggtgccaattattgcgacccatggtggcccgggtgcgtttgccgtggaatatcatacgcaagcgccagcgtaaagtgagcggtgtcccacaggcgacttgtctacgagcactaatggcaaatggtgatcgtcccaacaggggatggtgaccattttattgttcaaagatgagttagctctgattaaatggactgctcaacggtgaagaaaggttggatgccaatgtccaaagttaaagaaaccatcaaaatcattttagtggtggcggtgttagcggtcggggtgtttttcggggtcaattatctgctgcatccgcaaaatgaatcggcgacgactaccccaacaacgactaaaaagaccactgccaagaagacgccccaaaaggcgaaaatcaacttggtcgcggtcggtgactccttaaccgaaggggtcggcgatgagtccgagggtggctacgttggtcagatcaaaaaaacgttgacgactaagcaaaagctgaaggtgacgaccacgaatgctggtaagtccggtgatcggagtgaccagattttagcacgcattaataagtcgaaagtgttacaacagaaaattgccaaggcggatgtgattactgtgacggttggcggtaacgacctcttgcaaacgctcgaagggtccctaacttctaacaatacggccaaaaataacgcgacggttgctaaagcgcaaactttatatgcgaataaactaactaaattatttaataaattacaaagtttgaatggcactgcgtcagtttttgtctttagcatctataatccaatttatgtgaactttccaaatgtgacgtcgatcacgcactacattagccagtggaatgatcagacacagacgacggttagtcaatacaagcacacgtattttatggatatcaattggaccatgtcacacggccagtacaagacggcagcccagattcgcaagttgaagaaagcagcgagtgccacgaccttaactagcttaaccagctcaaaggccattactggcgctttagagacagaaaacaagacgaatgatttgatttcgactgctgataatttccatcccaataagcgggggtatcgtgtgtttacaaccaaactgtatcagaccatgatggcccatgatgcgtggttaatcaaaaaatagggaggtaatgagatgcgggaagcacaacgaaacaagcaggcatcagcacctaaaaatccgaagacaaacggtccaatcaatgtttggaaatgggtcgccgttgtcttgattgcgttgattgtcggcaccggtgcttacgtcggcacccaggtcttacgatcgcctagcgaaagcactagtttgacggctgcaagcaatacggatgcggctagtgtgccgattacaatgaatcgaaaacaattaaacgcccttgcgagttattatttgaatgatctacaaaagggccaagacatgaaatatcgcttcgtggtccggtctaccggcgcttatttgctcggaacgacgcaggtactgggtcagaacgtgtcgtttgtgatcacgatgcaaccaagtgtcatcgataacggcaatatttcgttgaaagcaaccaatttatcggtcgggacgatgtccttgccaatcagctttgtgattaattatattaataataattacaagacacctaagtgggtcaagttgaatgccaagaagaagacaatcgacctctacttgaataaattagttggtaaacatgatgttcgttatagtgtagataagcttgatttgaagaataatcagttcaagttcgaaatgcatattccaaaaactagtgactaaggagtgaattcatgcataaaacattttatacattcttgatgacgcaacggaacccagacagtaccgatgccattgccgaatttgccaataatgcgtttttggatcaatcgtttccaaagcagagtaaagattttcacgaactctcacaatatttggaattgaacgctggttatttgccaacgatgacggtctttgatgacgcgtggcaagcctatttggcaagtgaagcttaaattaatttgtaggaaagaggacgttcggtatgccagaggaacccaaacaaactaatccgcacataaaaaaagtgccccggcccaagcgacgcgttggtctatggacctatattatttccattgtcgtcgcattaggcattggggtgggtgggacgtactggctgattggtcggcaagtcaatgcccagctcagcagtatgcagcagactagtaaagcaatgaaaaagatcgaatcagtttatgaaacgatcaatgagaattactacaaaccggtcaatgcgaataagttggccaacggtgccattaacggcatggtcaattcgttaggtgataaattttccgagtacatggacaagagcgagacggaaagcttgaatgacacgatcgacagttcgttttctggaattggtgcccaggttcaaaaatctggcaactatgttcaaattatttcaccaattgctggtacgccagctaagaaagctggtttgaaaccgaaggacattattaaggcggtcaatggcaagtcagtggccggtaagaccttgacacaagccgttagcatgatgcgtggtaagatcggtacgacggtcaaattgacgattgaacgcagtggtcaaacctttaccgtaagtttgaagcgggctaagattccagtgacgaccgttgattataagttagtcggtggcgataagaagatcggttatattacggtatcgaccttctcgacgaatactgctaaggaatttaagacggcgttgaaggcactcgataagaagggggccaagaagttagtcatcgatatgcgtggtaatcctggcgggttgatgacggctgccttgaagatggcctcaatcttcttgaagaatggtaagacgatcatgcaggtccaagcacgcgatggttcgaccgaaaaatacacggcgtccaagaagtatgatggtggctttaaagaaacgaagccaacgaccgtcttaattgatggtgggagtgcttcggcagctgaaatcttctccgcagccttgcatcaatcggcaggtgttaaactggtcgggtcacagtcatatggtaaggggaccgttcaaacggtgacgacttttaatgataagactgagatgaagatcacggtcgcgaagtggctgacaccaaacggcacttggatcaacaagaagggcttgacacctgatgttaaagctgatgagccgagttatgcaagcttgacggttattagcaaggtcagtgatttacaagctgacaaggtcaatagcaatgtcaagacgttccagaagtacttgcaagccttaggttactttaaaggaaccgttaatggctactttggtgattcaaccaccagtgcggtcaagcagtatcaaaagcatgccaagttaacggtcaatggcaaggtcgataaacagacactgactaagatcgagactgaattagctaataagatcagtgataatgatcgggcttacgatgcagcaatgaaattgattgaaaagacaaattagttcaaagctgattcgtatattttaaaaggcgtaaccgaaatccgcatggctttcggttatgcctttttagttgcggaattttaatgcggtaccgtcaacgaagctttgacaagatggaggtggatctacgaattaggctcaaaaatggcttgtcacgggtggctttataaatcggcagtggaaagtcttgttcatcatgaatttaaatcaagatttagacttgccttgcggtgggggtaaagcggtatactagaaattgtgcgttaattgatcagtatgaaatagtgaatttcaacgggttggattgaggtaacttttagctgaacgactggcgagatgtttagcaattatagaaagaagttttgttgtgaatcgacgggccatttattttgttcagggcgccctgttactatcgaacgttatggctggtatcgatagtacgaatgtcaatacggcgctaccagcaattattgcggatttacacggtctacggttaatggcgtggatcgtcgctgttttcttactaggaacggcagtttcgaccttgatctggtcaaaaatgggtgagcgctttggtaataagcgagcttatcaaatgacgacggcactctttattgtcggctccttactacaaggattagcacccaacatctggtttttgattattgctcggggtgttgcgggtctcggcaacggggggatgatttccttaccttacatcatgtatgcggacatttttaagaatccgcgtgatcgaatgcgggcactgggactagtctcggcttgctttagtatggcaacgattattggccccatggtcggtggtgtgattgtcgatgtgtggtcttggcactggatcttttacctcaacgtaccaattgggattgtctcagccgtgctgttacaaatcttctatcaagaacctaagcgggaacataacttgcaaccaatggatcgtgcaggggcgttattgatggcggttgggatcatcagtttgcttggtggtattgaactgatcggcatggtgtcgttatggattgtcgcgatcgtgatcgtgggggcgctcattgtgttgggcagtttaaccatcgtggaacgtcgcgctgtggacccggttattccgggccgcctgtttaagaacgcgccgttagtggtcgatttcgtcttatttgtgcttatttggggcgcgttcgttgcctttttgacgtacagtccgatgtgggctcagggcttgctagggacgtcagcgttaattgggggagccacgcagattccaagtgcttttgctaattttgggggtagtgaatcagttccccgcatgcggcggcacttgacgccccatcgcgtcttgacgatcaatattatcattttgacgctgaccttcgttccattgatgattggcggtgttaagcttccatactgggtcttactcttagctggcttctttgaaggttggggcaatggggcctgctttaatgagctgcaggttaaggtccaagtagacgctgatcaacgtgacattccagttgcgacttcgtttagttatttgattcggatgctcagccagacgtttaccacggctatctttgggctaatcatgaaccaagctctgactagtggggtggcacgatcggatggtaaaatcaccatggcgatgatgaaccagttaagtgatgctagtcgggcgggccggctaccagcgcacctagtgccgatgatgcgtggcatcttacacactggactacaaaatatcatgattgttgcgttcggattaatgatcgtcgctttagtgatcaacttatgggcacaacgtcatgagacgcaacggcaggcccagagctagatagcatgtgcaaacttgatttttgcaatgatgattggttcggaacaacttacggagaggtattctaattgaatacctctttttattctgtgcgatgcttgtatcgctgaattactaccgaaccggaattcatccaattggcagattgttttaatcatgattgaaggtgactgtcaagctgtgcctatcagttgcatttaaagagataatacgatatattaacatcaaccacttactaaaagtaagtaaagcaaaagtaatgggggcattaagatgattgatgttaatcaactagaatttgggttagaaacatttggggatattgtggcgaacacggatggtagtttacagtcggcgggagagtcattgcgccaaatcgtgcgcgaaggtcagttagcggatcagtatgggctggatgtttttggcattggtgaacatcaccgaccagactacagtgtctcaagtccggaaacggtgttagcagccaccgctgccgtgacccagcacatcaaattagcgtcagcagtaacggtgctgagttccgatgacccggttcgagtttatgaacggtttgcaacgttagacggtctgtctaatgggcgcgcccaagtgatgttaggacgggggtcgtttaccgaatcgttcccgttatttggctatgatttgacggattatgatgacctatttaacgaaaaactcgcactatatgaccaattgcgaacggaaaagccggtgacttggtcgggtaagtttcgggcttagttaacgaatcaagacgtgtatccaaagacagctactggtgaacttgagacttacattgggattggtggttcaccagaatcaattattcgcgcggctaagattggctataaagtcatcattgcaatcatcggtggtcgggcggaccgatttaaaccgtatatcaagctgtatcatgaagccgctaaaaagttcaatcagccagcttatccgattgcggtgcattcacatggattcattgcggatgatcaggatgaggccttgacggtggcttatcaaaatatcaaagctaattttgatcgcattggattgacccggggatgggcgccaatgagtcacgaacaatttgaccgtgaaaccaaatacgggtcgttttatgttgggacgccgaccgtggttgcgcaacggatcgcgacgacgattgaaacactagggctggggcgctttgacttggtatacggggccggtaatcaaacggcggctcaacgtgaacggatgattgaattgtatgcgacacaggtgattccacaagttaaaactattttacaagcgaagcaggtgacgaccaaatgacagtcaaaaacgttggaatcctcggcgccggtaaagttggtatcgtcttagcggaactggcattggcggccgggtatgacgttcgcatttcgggctctggcaaagtaagcaaaattgaactaacgattcaaacactagttccgggtgcaattgcggcggaaaatcaggatgtcatcgccaacagtgagttaattattttagcattgccgctgagtcgttaccggcaaatcccggctacggcgcttgatggcaaacttgtaattgacgctatgaattattggtgggaaacagacggggtacgggaagaagttctggatccccagacgtcctccagcgaacaagtccagcaatacttcaaagggagccatctggttaaaacactgaaccatatgggttatcataatctgcaagaagacgccagacctaatggcgatccggcgcggaaggccctattggtagctggtgatgagccccaagccgtagcaactgtggcccactttgtggagacgcttgggtttgatcccattagctatccccgactggcggatggtattatgactgaacccggcagtccgttatttggggccagtttaagtgcgaccgcgcttcagcaaatcattgatcattttgatgaaactgattttggtcgtgcgcttgcggccaaacatgcattggatgttgaaacaaacaagtagctaaaccaaactaaaatgtggcattcaacctgaatgtcgtattttttcgtgatcttagttggttagatggggaaacgcacaacgcaagactaattcaaacatgatagaataaattttgaagccgaatattgacagtttgctgtgtcaaaaaatagttggcattaaatttgaaagttggcatttgagatgagttataagcgttggaatgtagagaaggcaatcgttttagcactacgggaacttggtggaacagcctcacgaaaaataatacgccagacaattgctacaaatgaatatgttaatctgaagtatgaggatgtctatgatactaaagtcagtgcacggaccggaagagcgtataatcccttcctatacgatttcaactttgggttaaaaaatctacttacagttggctatattagttccatggaatggggaaaggaaatttcactgacaagtatcggcagaactgctgaattatcaaattatccgacctctgaacaaacccaactagttacgaactattggaatcaaaagacacgtgaaagagtacatcggaaattaacagcaatgcaggaatctgatgacaagttggcagatagggatgaggatctggtcgtaatcgatgatccagagtcgcgacaagatgcagatgaatcacaatggaagagtgatttaattgaatgtttaaaaaaattcaattctggaaagtttgaaaacttttcgcgagcattgatttcaaaaatgggtgtgaccattgataaaaatcgtggtgtggtacgttcagctgatcacggtatcgatggctttggctattttaaatccgacgagtttcgtactagccgggtggcaatacagtgcaaacggtatacgcaggaccaggtatccgaacctgaaattgataaatttaagggcgtcatggatagttttaatgctgaatatggtatctttgtgacaactagtcatttcactaaccgagctaaagctaaggcgatgcagggaaataatacggtaacactaattgatggtcaggagttagctgatttagttgaaaaatatgaattacagattacccctattaaaacatacactttaaatgcatattattatgaacaagattgattgaattttgagtgtgttgaaatctcatcaataaattaagataaaaaaactgatatccccgctgagttaatccatactcagcgggggttttgaaaaaggatatatatgatgtttaaatggtttaggtgtcctgctttagtgaaggcgattgcggtttggacattaaagccttgatcaaattgcaaaaaacaacccgccactgtatgttgttaacaaaaaatgaattcagtcacgtcatgtgtcgatcagtcaattattattaaaaacgtcaaagccatatccttgaatgtgctgtttcaatagtgtcaaatagcgctgggccgtagcgctcaattcgattttcttatggcgcaggtatccaagggtcattgcatcatccacttttagtggaatcgccacaattttttcgtcattgagttcactgctgatgatgcctgaactgatcgtatagccgtttaaacccaccatcaagttgaagatcgttgcccgatcactgatgcggatatgctttttatgaggtagcgtactgaggatttcttctgcaaaataaaaggaactcgtatcgccttgctcataagagaggtagggatagtctcgtaggtcatccaaagtcagttcttgcttgtgcgttaatgggttatcacgaccgacgaaaacatgcgggcgagcctcgaatagcggtacgaagcttaagtctttgtcagcaattaaacggctaagcacggtctgattgaacttattaagataaatgacgccgagctcgcttttcaaagtctgaacgtcattgagcacgttggccgtttcagtctcgcgtaatgtgaactgataggtatcgccaccaatttccttgactaattcgacaaaggcgttcacgacaaacgcatagtgttgcgcagagacactaaagatacgcttgcgaacggttccctgaccaaaatgttcgttgagtaaattaacttggtcgaggacactgcgagaatagttaatgaattcacggcccgtatccgtcaaagtgatccccgttttatgacgataaaacagctgtacttgatattccttttcgagttctttcattgcttgggataatgagggttggctgataaataactgtttggccgcctcgttgatcgagccagtcgtggcaattttttctaagtagcgcaattgttgaatacgcattaagtgcacctcctgagaaatgtctggtttcagtatctaattaacgcatgattgtagctggtgtgattgaataaattatttaggttataggtattgcctattatatcatcaatgcaatcagtcttatctattttttaatcagattgttataataaactcattaagacagacacggaggatgattacattatgacaaaaacacatttccaattggtcggctcactcttacgcccggctagtttacttacttataaaaatcaaatcgaacatcgtgacgatattcaatacccattttatgaggctttgccgggctaccaggctgccgaaacagcggcagtgaagacggtgattgccaccgaaaaggcgcatgggattgatgtgctaacggatggcgaatatacgaagtcaatgtggcatttggattttatttgggggtttagtggtgttcggcggtttattgcggatgaaggttataattttcgcgatcatgacggcagtgattttgaaacacgtaaagatattggcattgaaatcacagcaccactttctggcaagcatcatcattttattgatatttatcagcaacttaagtcacaagccgatggtaatgacgttaaattaacgatctggagtcccgcacacgcctttgttgagtttggatacatcgataagctatatggccctgaccagatttacaaaactgttgatgacttgcatgcaggcttactcggggcgtataaagaattcttaacggattatcaagctgcgggtggcaaaatcatccaattcgatgactgcttgtgggaagtgtttgccagtgataatcagcaaagtccctttggtgctggaaatggcagtctccaagaattagctgatgtagccgtcaacaccaataatgagttagttgattttggccatcaattagggttgaaagtttggacgcataattgtcgtggtaattatgaaagtcggcactttgcagaaggcagttacaatacgattgctaagaaattcctgcatgaccaacactacgaccgtttcttccttgaatgggacgatgaccgcgccggtgatctttcagcgctcaaggtacttgaggaccggccgaatgtggaagtcgtcttgggcctgttatccagtaagaccaataccttagatgatgaagatcgcgcgttacggttactgacgcaagctagtcaaattttgaataagaaccagttatatttatctcatcaatgcggcttcgcttcgtgtgactcaggcaacgagttaacggcggctcagcagtgggcaaagattgatcagggacaaaagattgcggctaaattctgggattaagtcacgtcagttaattagctgacggctatcaaacgacaatcaaacaagcgcgatgttgcggccatcttgatgatgaaggctgtgacgtcgcgcttatttgcagttgtagtaggtgaactgtgtgtatgatcgtatcggtggacgttaacgttaaggacggttatgcgatgtgcttggactaacgagctaattgacagctaccgcaagcttgcagccaataaaatggggtcgatgttccggttagctaaattaacgtgtggaagtattgggcagcagatcaatggtcggtttcaaagcatggtcggtgtaaacatggtaaaatatagattgctgcatcatgccagtcctggactagcaagcgtccggtgttttagttcatgggcggcatagcgaccaacgatttcgttgaatgaatgcattagtggcggttggtgcacagcacttaagcatgtcgccactggagctagcagcatcggcttgacagccagtgccgttaaagaattttaacaatgatcaaagtttgaaggcattcgcgccacgagaaaaaggagcacaacgtaatggcaaatattcaatggtacccaggtcacatggccaaggcgattcatcaaattcaggacaatttacatttagttgatattgtttttgaattggtcgacgcccggatcccagtggcttcccggaatccagaaattgaaaaaacggtccaacaaaaaccacacctcttaattatgaccaagaaggacttggcagatccccaagcgacagctgactgggtcaagtattacgaagaccagggtcaagttgcgatcgcggtcgattcacgtagccgtacgattggtaaacaaatgacgcaagcggctagtgacatgttagctgacaagttagcaaaaattgcggcccgtggcattactaatcggccaatccgcgcagtttgtgtcggtatccccaacgttggtaaatcgaccttattaaaccatattgtcaataaaaaaattgccaaagtcggtgatcgtccgggcgttaccaagggccaacagtggctcaaagcgtccaataaattggaattactcgacaccccagggattttatggccgaagtttgaagaccaagtcgttggtaccaagctggccgtcacgggtgcgattaaggaaaatatctatcctaacgatgacgtcgctttgtttgccttggacttcttcaagcagcactacgcggcacgcttagtcgatcgttatcatttgacggctgagcagttaaccttaccaaatccggaattactgattgcgatgacgaaaaatgcggggatgcgcgatgactgggaacgtttctgcgtggccttcctcttagatattcgcaagggccggctcggtcgttttacgctcgacttaacgggggatcaacccgatgcctgaacgaacgattgcggattttaaacggctactggctgaccaaccaacggtatcgcttctagccgcggctcaagccgatcctcgcaagggcgtgcaacaggcttatcaacactatttgcgacaagctgaaaaacaggcggcgttagtgacacgttttaatcaacatatgcgtttagaacgggatttttgggcccacggcggacaatacgttgctgggatcgatgaagttggtcgcggcccgttagctggaccagtcgtaactgccgctgtagtcttggacgatcattttgatttgctagaagtcaatgattcaaagcaattaaccgctaagaaacgggcggccctgatgccacggatcctagaagaagcggtcgccgtgggaatcggcgttgcggatgcccaacaaattgatcaattaaacatttatgaggcgacccgagtcgcaatggcccaagccgtccgtaacctgtccgtccggccaacacgtttactagttgatgcgatgcaggtgccggtaccaattgaacagacccgtctaatcaagggcgatgcgaaaagcgcgagcatctcggcggctagtattgtcgccaaagtcgtccgggatcacttaatgacaatgtatgatcaagtgtatcccgggtacgactttgctgataatatgggctacgggactgctaagcatttggccgggttggccagtctcggcgctacgccgattcatcgccaatctttttcaccggttcgaaatgctaagcgggtctaaatccgtaactactctttaaagaagccgttccgttgacgactaatgtcaacaagggcgaacttaaggagtcgtgataacatgcaattaagaagtttattgattcgattacatttagcgcacggcatcgggtatgccgggatggtacgcgtgttacaacactgtcggcaggttcagacggtcgtcactgatccccgccgattaggtaagttggcccatttaactgctagtcagcaggggcgttttaccgctgattggcaaagtatggcgtttcaacagcgactaaaacgccatgcgcagcttgatattttaacaatcttggatgatgattacccaccggccttattagaagcctatcaaccaccattagtgttgtttttgcgcgggcagcgtgcgttactaacgacacgtcaacttgcggttgttggtgctcggcaggccacatcgtatgcggaacgggtcacgacgcaattattggcaccgttagcaacggcaaagttgaccattgtcagtggactagcgaagggagccgatggttttgcacatcggaccgcccttcgttttaacttaccgacaatcggggtgattgggaccgggctggatattagttacccccgtcaacaccgtgacctacagcagcaaattagtcaggtcggtttactaatcagtgagtacccgctgggggtgggtccggaaccataccacttcgttgctcgtaaccggattattgccgggctgtgccaaacggttatcgtggtcgaggcgcaggcccattctgggagtctgatcactgctaatatcgcgttacaaaacaatcgcaacgttctggcggtacctggaccaattgatgcaccattttcagttgggtgcaatcaattgatcgttgcgggggccaaaccagtcttaaattcgcgacatataatagaagagtttttaccaaaaatttgacaacacgaaatttttgaaatatgattacagggatttcttaaactgatatttataataatgataatgaaacctgtaaggagctgatcgagtggctgcaagtacaactaaagccaaaccggcggcaaagcggaagaccgcaactaaaactgctaccaagcggaaaagcaaaacacccgctaaaaaattggtgatcgtggaatcaccatctaaagcaaaaacgattgaaaaatatttaggtcgttcttataaagtcgtcgctagtctgggccatattcgggatttaccgaagagcaagatgggtgtcgacgtggataacgactacgaaccgcactatatctcgattcgcggtaagggtgatgtgatcaaaggattgcggaaagaggctaaaaaagccaaagccgtgtacctcgcatctgacccggaccgtgaaggggaagccattgcttggcacttatcctatttattaggacttgaccctaaggataaaaaccgggtcgtcttcaatgaaatcaccaaggatacggtcaaaaacgcttttaaggaaccgcgttcaattgatatggacctagtggatgcccaacaggcccggcgaattttggaccggttagtgggttactcaattagtccattattgtggaaaaaggtcaaaaaggggttatcggccggtcgggtgcaatcgatcgcgctagatttgatcattcaacgtgaaaatgaaattaaagcgttcaaaccccaagagtattggacgatcgatagtgaatttcaaaagggtcgttccaaattcatggcaagtttttatggaacccatggtaagaagcaaccgttggatgacaacgatgcggtgcaaaaaatcttgggccaattagaccggaatggcgattttaatgtcgtcaaagtcgtcaaaaaagaacgtaaacggttcccggcgccgccatttacaacctctaccatgcaacaggatgccaaccggaagttgaatttccggacgcgtaagaccatgatggcagcacaacaattatatgaaggcatcaatgttggtggtaaggaaggtagcgtcggcttaatcacttatatgcggactgactcgacgcggatttcgtcgattgcgaagcacgaagcgtcacaattcttgcataaagaatacggcgcagaatatgcggccaccaaacctgtcaagggcaagttaccagaaggcgctcaggatgcccatgaagcaatccgaccctcatccgtcttccggacaccagctagcatcaaagactacttgacgaaggatcaattccggttataccagctgatctggtcacggtttgtggctagtcagatgacgcccgaagtacttgacacaatggcggtcacgatcgaccaaaatgacgtccaattccgggcgaacgggtcgaagacgaagtttgctggttttacgaagatctacgataagacggaaaagaataacgtcttaccagatttaagtgaaggtgatgtggtcaagttatcgaagactgatccgcaacaacacttcacccagccacccgcacgttactctgaagccaacctcatcaaagcattggaagaaaatggtgtggggcggccgtcaacgtacgcaccaaccctggatacgattcagcggcgctactacgtcaaattagaagcgcgccggtttgtgccgactgaactcggcgagatcgttaacgatattattcaggaatacttcccggatgtcgttaatgtcggctttactgccagtttagaagaacagttggatgcgactgaagaaggtaaggaaaactgggttaaagtcgtcgatagtttctacaagccgttttctaaagaagtcgcaacggctgaggaaagtatggagaagatccaaatcaaagacgaattagcgggcttcaattgtgatatttgtggcgcgccaatggttgtgaagatgggccgttacggcaaattctttgcctgctcccgtttcccggattgtcgtaatacgaagccgatcgttaaagaaattggtgtcgtttgtccgcaatgtaagaagggccaggtcattgagcggaaatcgaagaagaaccggattttttatggttgttcccgcttcccagattgtgactttgtctcttgggataaaccggttggccgtgattgcccgaaggatggccattacctggtcgaaaagaaggtcaaaggtggcaagcaagtgctttgtccgaatggcgattataccgaaaacgttcaaaaataaatgaaaaaaaggtcatctagggatgatctttttttgtgcattgtcaaataatgcgtacaatttttggaaatacgttgataaaattcgtaatttaaactgattaacaagtgttttatcgggaaaataaacgcccgtttaaattaatgttcgctttaagcttgacggtggacatgtcattgcaggatttgctgatgccattagttgccttctgctagtttctcaggtatgatgacaacaatactatcaatggtatgacaacaagaaaagaggaattctggatggcatcaataccaacagtaaacgtaattggcgccggtttagccggctcagaggccgcttggcatattgctaatatgggcgtcaatgtccggctgtatgaaatgcggcccaacaaaatgactcccgcccatcacacggcgcaatttgctgaattagtgtgtacgaactcactgcgggcgaaccaattagccaacgcggcgggcctactaaaggccgaaatgcggcagatggattcgatcgtgatgcaagcggctgaacaccacgctgtcccagctggtggtgcgctagccgttgatcgggatacgttctctgcagaaatcacggctgcaatcaccgcgttacctaatgttgaaattattaatgaagaaattactagtctcccagatggcattacgatcgtagcgactggaccattaacggcggcgtccttagcgaaatcgattcaagcgtttaacgacgaagatgacttacacttttttgatgcggccgcaccgattttaacgaaagattcgatcgacatggataaggtgtatctcaaatcacgctatgaccgtggtgaagcggcctatctgaactgcccaatgtcggaagccgaatttgacgttttctatgacgcgttgattcacgccgaaatggccgaagcgcatgattttgaaaattcagatgtctttgaaggctgcatgccgatcgaagtgatggcacaacgtgggcgccaaacgatgctatttggcccacttaaaccagtgggccttgaagatccgaagacgggcaaacaaccctttgcggtcgttcagttgcgccaagatgatgccgctggtgatctatataatattgtcggcttccaaactcatcttaagtggggcgaacaaaaacgggtcttttcactgattccgggtctggagaacgttgaatttgtccgttatggcgtcatgcatcgtaatacttttatgaagtcaccgaaactattaacgccaacttatcagacacagcaacggcccgatttattttttgcgggccaaatgacgggtgtcgaaggctatattgaaagtgcggcgagtggcatcgttgctggaaccaacgcagcgcgcttagcacttggtttagaaccggtcgtttttccaacggacacgatgatgggggcgatggcccactatatcacgcatacgagcgctagcaacttccagcccatgaacgccaactttggcattatgccaaaactcaaacagcgcattcgggataagcgtgaacgtaatacggcgatttctgaacgggccttggctgacctgacgacttttaaagatgaaacgttgaccgttaacaactaaaatatcgccccattgacagggtgcataattgtgttttcctccatactttgctaaagtagcaacgtatggaggtttttgcatggaaacggattatttaaccctctttttaaagtacattcgggttgaacgacagtattcggaagagaccgctgctgcttatcgggaagacattcaagcttttaatgatttcttaacggcaaatggcggcgcgaaagcgtatactgaagttgaccggttggacgttaacgtctatttaagtcatttatatgaccggcacttgacccgaaattcaattgctcggaaagtttcaagcttgcggtcgttctataactttttggttaagaatgatttagctaaattgaatcccttcgtgtacgtccaactcaaaaaacacgcggcgcgcttaccccgttttttctatcaaaaggagctggacgtattatttcaaaccgtctatgcggatgatagcgtgatgggggcccggaacgcggcgttattagaagtcctgtatggtactgggattcggctgagtgagtgtgtcgatctacaattagccgacgttgattacgacctaaaaatgatgttgattcgtgggaagggcgataaggaacgttacgtcccgtttggtcggtacgcggctaccgcgcttcagcattacgaaaccgtctgccggcagcccgtgatggccaagtatggtcaaacgcaccaaacggtgtttattaatcgtcacggcggccccattactggcggcggaatcgaatatgtcttgaatcaaatcgttaagaaaagtagtttaacggctgatattcatccccacatgctccggcacacgtttgcaacgcagatgctgaataatggtgccgatttacggaccgtgcaggagctgttaggtcatacaagtttgtcaacgacgcaaatttatgcgcacgtgacaaaggaacatttacaacaagattatcgtcaatttttcccacgggcaacgcgggaatcgacaaaggagactgaacatgacaacgaaatttgaagcaactaccatttgcgccgttcgccaaaacggccataacgccatggccggtgatggtcaggtcacgatgggtgaaaaagtcgtaatgaaagggacagcccataaagttcggcggatttataatgatcaggtcgtcgtaggttttgccgggagtgtcgcggatgcgtttaaccttgaagatcgttttgaaaagaaactcaacgaattttctggtaatttacaacgggcagccgttgagcttgcccaggaatggcgcagtgaccaggcgttacagaaattggaagctttgttgatcgtcatgaacaaagatgacatgttacttgtttctgggagtggtgaagtaatcacgccggataacgacgtcttagccattggttctggtggtaattttgccttagccgcagctcgcgcaatgcagctgcatgccaaggatatgagtgccaaggaagtcgctgaagcggcaatccatattgccggcgacattgatatctttaccaatcataatgtgatctcagaaacgttgtaatgtaggaggaaacgcttatggaagaaatcaataagacaccgaaacaaattgtggccgcgcttgataattatgttattggtcaaaaccaagctaaaaaagcggtggcaatcgcgctacgtaatcgttatcggcggatggaactttctgctgaaatgcaggaagaaattacccccaaaaatatgctgatgatcggaccaaccggggtcgggaagaccgaaattgcccggcggttggctaagattgtgcacgccccgtttgtgaaggttgaagcaactaagtttacggaagtcggctatgttggtcgcgatgttgaatccatggttcgtgacttagtggacgtggctatcgagatggaaaaacaacaggcttattctggtgtgcgggcacaagcggtgcaggctgctgacaaacggctcgtcaaattattagtaccagcccaaaagaagcaggctaagaacaatggtaacgagttccaaaacatgatgaacatgtttagccagatgcaaaacggccagacccccaacgttgacgattcaagtaacgaagaagtgaccgatgaagttcgtaatcaacgattatcagttgccgatcagttgaaaacggggcgcttagaaaactcagaggttaccatcgagatggatgacccccagcaagccgccgcgggtaataataacatgcttggtcaaatgggtattgatcttggtgatagtttaggtgccttaatgcccaagaagcggatccaacggacaatgccagtctcagaggcccgagaaattttagtccgggaagaatccgaaaagttagtcaataacgctgatatttatcatgatgcgattgtccgtgctgaaaataccgggattatttttatcgatgaaattgataagattactaagggtggtcagcaaggttccggtgaagtttcacgtgaaggggttcaacgagatattctgccaatcgttgaggggtcgcaaatttcaacaaaatatggtcccatcaatactgatcacattctgtttatcgcttccggggcctttgcggaaagtaaacctagtgatctgattgctgaattgcaaggccgttttccaattcgagtcgaattagacgatttaagcaaggatgactttgttaagattttgacggaacctaagaatgcgttgattaagcagtatatcgccttgatcggtacggacaacattaaagtgacgttcacgattgaagctatcgaagcgattgccacgattgcctataaggtcaaccatgagacacaaaatatcggcgcccgtcgtttgcacaccattttggaaaagctcttggaagaattgctatacgaaggtcctgacatggaaatgggcgaagtcacaatcactgaaagctatgtcaacgagcgaatcggtaacattgcacaggataaggatcttagtcgttacatcttataaaatttatcaagggggcgtttacgcggatgacagtcgaattaaagaatgagtacctcaccgttttgatcaatgaagctggggcggaattaagtagtgtcaagtcgagtgacggtattgagtacatgtggcaggccgacaaaactttttggggccggcacgcacccgtgctttttccaatcgttggtcgtttaaaggatgaccagtatactgttgctggtcaggcttatcacatgggacaacatggttttgcccgcgacaatgactttacggtcgtcaaccaaacggccacacaagcaacatttgaattgaccgatagtcgtgcgacgcgggagatgtatccgtacgcgtttcgattacgtttgatttatacgttgacggatcatgaattgaccgttaactacaatgtgcataatccagctaatcaagagctgttattttctgttggtgggcacccagcatttaacgtaccactcgctgatccggcgggcacactagctgattataaggttactgtggcaccacgaaaggtctacgcgcatattccattacaggcaccgttgaacgatgcggcaaatgcggatgacttcgacctgaccaagccattagcacttagccgggatttgtttaaggacgatgccctgattttggatttgaatcatcacgagacgacgttaatgttggacactgatctggatgatcatggggtagcgatgacgattgaagatgcaccatacgtcggcatgtggtcaccataccccgcagaagcgccgttcgtgtgcttagagccatggtggggcattgcggataacgttgatagcgacggtcaattaagccataagatgggcattaaccggcttgcagcgaaccagacgtttgatgctaaatatgcgattagctttttctaactaaaatactgtggtttagtgaaaccggtcgacaggtttgaccggtttttattgtggtctgaaaagatagcaaaataaagaattgtattatcttactttaactagaaacaaaaaatacaaacccagcaccaaagcttacccgttcctaaataaaaagaccactcagtaatgaaatggtcttgaaagtaacataattatttgcggttagcccgttgctgacgtcgccaaccaagtccgaagtgtaccaatgattcggtcccgtttttgatacgtgcaatattactgcggtgccgatagaagatgaagagggtcaatgcaaaggccacgagtgatagcaaccaatcctgatagtaaaaaattgcaatcaacgtgacgattggaaaagccgtcatactagcaacactgaccatactggtcgtgtaaaccaataataacatgatggcactagcaattaagaagaactcccagttgtaggccaataagatcccagcactcgtggcaacggccttaccacctttaaagccgatgtaaattgagaaagtatgtcctaaaatagctgctagtccaatcaataaggtataccggttattcatatgaaatagcaaggtcggttgtagtgctgcgatggtgccttttagaatatccatcaccatgacaattgtcccagcggtcgggcctaggacccggtacgtgttggtagttccgatattaccgctacctgcttgacgaatatcagtgtgaaagaaaaacttgccaataatgacacccgaaggaatcgcgccaattaagtaggcgatgatcagcataattattattttcaaagttggttcctcctgcaatagaatcactcaatattttagcattctttttaagattgtggggattaattagtttaaaaaatgatgattgcgtgtcaaattatgaaaataaaatgattttttgataattattatgtgcctaaaagcgggtggttagggcctttaaagcgctaactgtcaaattaatcacgcattttaagaactggtcgtgaccagtaataagtttattcattgaactggcgcttagaatcaacatgaggtaagctagtaagtggcttaatttttaaaagatagttttagacgcgaacgtgtgtttgctattttaattgttaacgtgtatgctaacagatgaagagccacaagtgacaattagaaattaacataattgtaccttgacaggttggggcttttaggactattttattacggttacctgaaagccgcacctagttgaggtagatttttaaagataaaaggagttgtgagaatggccaagaaaagcccaaaatatgatgattcttcaatccaagtacttgaaggattagaagccgttcggaaacgtcccggaatgtatatcggttctacagacggccgcggactccatcacttagtttatgaaattgtcgataatgccgttgatgaagccttagctggctatggtaaagaaatcaacgtgattattcacgccgataacagcatcaccgttgtcgatcatggtcgtgggatgccagttggaatgcatgcttccggtattccaacacctgaagttatcctcacggttttgcatgctggtggtaagttcggccagggtggttataagacttctggtgggctgcatggggtcggtgcgagcgtcgttaacgcattgtcgtccgaattgacggtaaccatcgtccgtgatggctaccgctacgttgaacatttcaaagatgggggtcatcccgtcggtacccttgaaaagaaagggaagactaataagccaactggaacgacaatgacttttaagccggacgctagtatctttacaacgacggtttataattttcaaacgttggctgaacggttgcgtgaatctgcattcttactgaaaggcgtcaaaatcacgctgactgacgaacgggaaaatcaacaacaagagctggtcttccattacgaagatggtatcaaggcgtttgtcagttacctcaatgaagataaggacaccctcggggatattatgttctttgacggcactaaggaaggtgtcgaagttgaggtcgctgcgcagtacaacgatggctattcggaaaacttgttgtcattcgtcaataacgtgcgaacgccagacggtgggactcatgaagtagggttccgcagtgcctggacgaaagcgttcaatgaatatgctcgcaaggttggcctattgaaggacaaggataaaaatttggaaggctccgatgtccgtgaagggttatccgctgttatttcattacgagtaccggaaaatctcttacaatttgaaggtcaaactaaggaaaagctcggaacacccgaagcacgaacgattgttgataatattgtgagtgaacaacttcaattcttcttgatggaaaatggtgaatttgctcaaatgctgattcgcaaatccaccaaagctcggcaggctcgtgaggctgcccgtaaggcccgtgatgaaagccgaaacggtaagcggcgtcataagcaggaacggttactttctggaaaattaacgccagcgcagtctaaagacgctaagaagaatgaattattcttagtcgaaggggattcggccggtggttcagctaaacaggggcgtgatcgaaagtttcaagcaattttgccattacgtggtaaggtgttgaataccgaaaaggccaaattagctgatattgtcaagaatgaagaaattaataccatgatttacacaattggtgcgggtgttggtcctgaatttgatattaaggccagtaattatgacaagatcattattatgaccgatgccgataccgatggtgcccatattcaaattctcttactgacattcttttataagtacatgcggccaatgattgacgctggtaaaatctacattgcgttgccaccgctgtatcgattacaaaaaaagcagaacaagcagttacggacggaatatgcatggactgacgaagagttaacgctcaagaccaagtcatttggtaagggctatgcactccagcgctacaagggacttggcgaaatgaacgcggaacagctatgggaaacaaccatggatcctgaaaaacggaccttagtccgagttcgaatcgatgacgctgccttagcagaaaaacgggtcacaacgttaatgggtgacaaagttgaacctcgtcgaaaatggatcgaaagtaacgtccactttaatttggacgaagacgggtcgttactagataacgaggccgtctcatccgcacatgagcaagccgacgaagaattggcacaacagctaaaacaatagagggggtcgtaaaatggcaactgaacaaccaaaaattcaagaactaacccttgaagacgtcatgggcgaccgcttcggccgttattctaaatatattattcaagaacgggccttgccagacatccgtgatggcttgaagccagtacaacgacgaatcttatacgccatgaatcaggatggcaacacctttgacaaagcgttccgtaagtccgctaaatcagtcggaaacgtcatgggtaattttcatccccatggtgattcttcgatttatgaagcaatggttcgtcttagtcaggactggaagttacgggaaccgctgattgaaatgcacgggaataatggttccatggacggtgatccggctgccgccatgcggtataccgaggcacgtttgagcaaaatcgctggtgaaatgcttcaagacattgataaaaagactgtcgatatggtcctaaattttgatgatacggagtacgaaccaactgttttaccggcccgctttccgaacttattagttaacggggcaacggggatttcagccggttatgcaacggaaattccgccgcataacttgagtgaagtcattgatgcgattttattcctgatgaatcaccctaaggcaacgcttgaagatttgatggactttgtcaagggccccgattttccaactggggggatcattcaaggcttagcaggtatcaagcaagcctatgaaactggccgtgggcgtatcgtcgtgcgttcgcgaaccaagatcgtaccgcttaaggggaataaatcacagattgaagtttcagagatcccttatgaagttaacaaggcgcaattggtgaaaaaaattgatgaaattcgcattctgaagaagatcgaaggtatcgccgaagttcgtgatgaaagtgaccgtcagggattatcagtggtgattgaactgaagcgtgacgtcaatgcagaaggtattctgacttacttactcaaaaataccgatctacaaattacttataacttcaatatggtcgccatttatcatcaacggcccgaacacgttgggctgaaaacgattctaacggcctacttggaacatcaacgggacgttgtaacccgtcggacccaatttaacttacagaaggctatggatcgccaacacatcgttcaaggattaatcaaggcgatgtccatcctcgaccaagtaattaaaacgattcgtggtagcaaggataagaagaacgccaaacagaacttggtcagtcaattcgatttctctgagattcaagctgaagccatcgtgacaatgcaactttatcggttaaccaataccgatgtgacgcagctagaaaaagaatcagctgaactggccaaggctatcgcaacctatcagctgattctggcagagcctaaagaactcgataaagttttacggcgcgaactaaaggccgttcaaaaagcctatccaacgagccgtttgactgagattcaaaatgaaattcaagaattaaaggtcaagaccgaggtcgtgattccacaagaagacgtcattgttatgattagccatgatggttatatcaagcgaaccagcttacgctcttattcagcgtctgagcccgatgataacgggcttaaagatgaggattatccgatctatctagctaaaaatagcacgttagatcatttaatgatgttcaccaacatgggccatctcatttaccggccgatttatgaaattgctgacgccaaatggaaagataccggtgagcacatttctcagacgattgggctggctgaaaacgagcgcatcacgtgggtctattcttttgagaaccttaaagctaccggaaaattcttagtggcaactagtgatggctatatcaaacaaacggcttttgctgattacacgccgggtcgaacttataagactcgggctagccagttcatcaaaatgaagtcagacgatgcaaccgttgtaacagtcgaatacttaccagctgcaccaacgggaaccctgattctgataacgcaacatgggtatggccttcgttatgatttaagcgaggtcccaacgattggtgcgaaggcggtcggcgtgaaatctatggatctgcgcgacgatgccattgtacgggcaacaatcgccgcagatgatgatttgattgccatgattacgcaacggggttcattcaagaagatgaaggtggcagatttacccgtgacaagtcgtgcacggcggggcgttcaagtcttacgggagttgaaaaacaatccacaccgggtcgttgattatgtcttagttgctagtgacgcaaatggggttgcacttgatgtgctgactgatcgtggtaagcaccattcgatcttgaatgatgatcatcctactagtgcgcgttattctaatggctcttttgtagttgatactgatactgaaggggaacctgtttctatgcagatccatccgatcccactaacggtatagtttccaatgcgaatacttgcacgttaacgggcattcgattaagataatattataacagggtaaaagattatgaattagttaatctttatttaccaataacaaccgcttgctttcactttgaatcttgtataaaattatagatatcataagatggcgataagaagaaaggatcaggtaaaattcatgaagacaactcaagaaagtattttctcatcgaaaacgttaacgtatttcttgcaactagctgaaactatgaattacacacaggcagctcaaattttaggaattacgcaaccagcattgacccaacagatcaaaaaactagagcgtaccgttggtgcccctttattttattccgttgggaaaaagttacgtctctctgacgccggttacacaatgcttaacgcaacccacagtatttatagtgtattgaacaaggcaactgatgaaatccagcagacaactagtgctactcaaggaacaatcaatattggcgtgctagcttcaattgaagaccatgtatttgaggattttgccattaagtattacgaggccaatccaaatgttattatttcgttgcacatgctgacgcgtaaagagatttgggaacgattagaaaataatcggattgatttggcagtcatgtacctacctgatgaaagtatcaagaactggaagccataccagtctaagaagattatccaagacgaattgctattcatttcgggtgacgagaagttagcgaagaagaagcgcatcaagttcaaagatacgacgttcaatccatgggtgacgtatcctgaaaactattacttggatcaagtggttaaggaatcttataagaaccagttggctgatttgccaacggcagtcgcacggtttacgacgccacaacagatttatcgctttgtggcagcaactaatactaacacggcgttgccaaattcatttatggtggctaatccggcaactgataagctccacacgttgtcatttgaaccagccatcaagtttgacttaaattttgtcttccgtaaagataaggaccaaattccgcgaatcaagaatttccttgatgaatttgatgcctacttacggaccgaagattatatttcacggttacaaaagattaatcaaaaataagttttaagggagttttgtgctaatgagtaaggaattagtttttggacatcaaaatcctgataccgacgcaatcgtggcggctaaggcgttctcatactacgaaaataagatgggagcggacactgaagcagttgcattaggcgaaccaaacgaagaaactcaatttgttttggattacttcgatgaaccagcactacgggtgattactaaggccagtgatgaagttgacagtgttatgcttgttgatcataacgaacctcaacaaagtgtgagtgacattgctgacgtaactgttagtcacgtggttgatcatcatcgaattgctggttttgacacggcccaaccattattctaccgggctgaaccacttggttgctgcagcactgtcatttacaagttgttcaaagaaaatgacattgaaattccagccaagttagctggattaatgttatctgcaatcatttcagatacattactcttaaagtccccaaccacaacggaaactgacgtggcagttgttaaagacttagctaaaattgctgatattgattatgaaacgtatggtttagcaatgcttaaagcgggcactaaccttgacagcaagactgaaaaggaattaatcgatgccgatgcgaagtcatttgaaatggctggcaagaccgtgcgcgttgcgcaaatcaatacagttgacttggatgatgttttcaagcgtcaagctgctttagaagctgctgcaaaagacgaaaatgcgagtgacagctatgatttattcttaatcttggctactaatatcttagatagtaactcggaattattagtcgttggtaacccaacggaacctgttgaaaaagcctttggtaagacgattgctaacaaccggttaagcttaccaggtgtcgtttcacgtaagaagcaagttgtccctcaattaacggacgccttcaacgcttaatttacagattaatttaaaaagaagctaccacttgttggagcttcttttttgcattctagctagattggggtatgataaatactgtaattagattgtacacaactcaattatggaaggactgatagtaatggataaacagcaaggtgaattacgacagcgtctaacgcctgaacaatacgccgttactcaagaggcagcgaccgaacggccatttagcggtgagtatgataacttttaccaggaaggtatttacgttgatgtagttagtggtcaagcactctttagctcgcgtgacaaatatgatgcgggttgtgggtggccatccttcactaaaccaatcgatcagactaatcttaacgaacaccgtgacgagtcgtttggcatgcatcgaacagaagtgactagcacacaagcaaactcacatttaggtcacgtctttccagatgggccacgagatcgtggcgggcttcgttattgtattaattcagcagcactgaagttcattccagttgccgaccttgaaaaggctggttatggtcagtatcagagtttatttaaataattgagttaataaacgggaggaatttagatgacagagactgcaatatttgctggtggctgtttctggtgcatggtcaaaccgtttgatcaacagcccgggatcaagtcagtcatttcaggttacactggtggtaccgtcgctaatccgacgtatgaacaagttgccagccacacgactgggcatactgaagcggttaaaatcacttttgacccagatgtaatcagttatgctgacttggtcgaaatttactggcgtcagactgatccaaccgatgcttctggccaatttcaggaccgtggtgacagttatcgaccagtaatttttgttaatagtgaagctcaacgtcgaactgcaactgcttcaagagatgcacttgcagctagcggtaagtttgctgagccgattgtgacaaccattgaagatgcgaagccattttatcccgcagaagccgagcaccaagacttttatcgacgcaatccattccgttatcaaatcgaagaaatgggtggtcgtgaggcgtttattaagcaacattggcaataagctagatggtgattaagcgttgaaaatggctcagatttgcgatcttcgtatcgtttgagtctcatctcgataaaaataaggctaaaaacacgaataaaccaacctgcaaccacagcaatcgtcgctgggctagtaggttggtttttgagttcaattatgattgttaacttgcttggtgcgcgtccaatgctgaataaaatgattttttgactgagtcacgaatatttaagtaagtaatataatcagataattcatgaacattactagtcaaaggaaaatcaaaatctgagtgcgcataacaagcggctggcgcgaacggaccattttgttcaataaacggttctaaccaacgatagaatgtcatcaaatcatcctttcaatactttagttaaattcaataaaactagtttaactgcaaaaaggtgcgttgtataggcgttttaaggcttcttaattaactagcaaattccacgtaatgcttgtgacgtgtttgtaaagttatgtaaagatcgtgcaacaacgtaaagctactttaactaaaaaagctaactgtagcagttagcccatcagtgtcacttagtcggttttagtggcttttaaagttcgcaaatcacgttgtcgtagcaagttttggtaatactcgaggctggtttcatctaaccgtagttgttgcatgatctcagtcggttcggtcgtccggtgttgcttgagaaaccacagcatgaagtcctggcgcaatgcaaccggctttaatggcacacctaaacgttgactatcacccgccaagtatttatgcaatgccgcgagggtgatatgtgggtcggttccgcgttgacgctgctttaaaaaaagatccgaactaccactttgagtctgtaatggctgcaaataggcccgtagtttaaccagaaaagcctgttctactgctgtaaaggtaattgcattcaactgctgataaaaccctggggttagcatctccgtggcagtataacccttggtcgttagtaacaagaataagcgggtgtatggatgcagatcatccattgctaaccatgccgccaattgctctggccaggtcgttgtttgttgacgattggtcaagggttgccctttgattgtaaaggttggtaaagttgtaataattcggtgtgaaaataaatagctaaagtagccgtttagattcgacagacatttgttcagtgtcgatgttttgaattggcgttgttcacggagcatggccaagtaagcttgaatatcattctcagttaaatctgctaataattgatccttagcaaaggtttcattgaagtgctgctcatagttgaaaaagtcagccaaggttaattcatattgctcaatcgtactagcttgcttgccagcagtttctaatgaggcgagaaagcttttagcatacggaaatttagcggtcattgatagtaggacatcctttctgggttagaattcttactttaactaaaacataaatttacaacaaaaacaagcgatttgaccgatgctgagagacgcgttctaagcgcgtgttcgtttattagttgaagagttgtcccttaaataaaccgtaaaatcgatgttagttatcagcaaattatgagcgtgcatgcaaactagtgataattggatttaggagtctgaaaacatttgaacttttagtgattcagataagttgatccaaattaacgaaaaatgctcggttgaaattcaatcgactaattttagtgttgatgtttgtgaatcataaaaaataatttaagttaagcggacgtcttgaaaaattctgaacagttagagccagcaaaatgattgcgacaaaatgacaatctgagaactgaatcaccagaaagctaacttaaaatcaaaaaattaccacaggggacctaaatcaggtcgtgggggagcaattttgtttttgattctactttgtataatatatattatgtaaactaggaaatgtaaaaaaagccccctagctagatttacccataatccacacataagccatcataatcacaacaaaccgcttttatcgcgtgaattgtcatcaagtttactgctagcacagcgataatttttaggtggtaaattaatttatagcacatttttataaaatctactgaactcactgaatcatatggatgtgacttaccgtgaatatatgattatgattcataaggtggccaccatgcatcatgaaatagcttttgactgtgttaatgatgttattgctcataactgttagtcaatcgactgaattgctgtgcaccttgggtttaaaactggcttttagaacgtaattgtttatcaagccgatttattgaatcgatggtttgctaacgacaatactaatttatcttgtcggcaaccacatcagtctaccgtaatttatattagaggccgcgggctgaacaccataaatgtgagtggcatccttgagtacctgcggttgtatgaagcccaggtaattagcggcaactagcctagctttcaactgttttttggcgattattagtcagaattgtggcttgacaacttgttaattttcagaccattagtcctaaaattaagcgtatttattgaaactgattgtgccattcaatttagtgtcaacaattattgcagactacgaacagtaattcgccatggcctcatatgtttgttggacatgcgctagatcaaaagtttggtgaataatttaccggggtgatgggttctttcaataccacggtaaataaaattgtgtaatttgtagcaagttgtcacgaacgcaatgtcatcacgcgaaccgatattacgcccaaatgggtcgttggggttcatttcaaccttttgtgacaacccctacccggccaaaaatagcacccggtcgccctacttttaagcctattccatttcaacgcacgttttggctgaagcctggcggattgacatgacggctcatagcaatgattttgctagcccgcgtaattacgccgaaccgctcccccagccactaacagcgtcatccatcgcccatagtactgactgtcgccctgcttaagttgcatggtcgccctagcttgaaacccgttgccatgacatgttggcgaagagcaatcaatcatttagtggtcatcaccgggctgtcctggcaccttgacgagcacccaatcggcattagtaaatggggattacgggccattaaagtcaattgatccgtggtatttgctaacgatactggcagtgccagctattaactatgaccgtagccacaataatttgatagtacaaattagacgatctgtccccttttaaacattataaaaagattattactgaagtaacagtcactactgtcagcaataatcttttttatatcatcagtttaattttcattcagtgagcttcgaacgctagcgattcatttgggtattgatcttgaaatggccactgttactcaactctgcttgatttgacgccgccagagcttggcccccgcgatcccgcaagtcatcaacataaggattggtaagtacaagataatatgatagcggccctgtacttctaatggtaaagcgcttaaggtgaaaccgtctaacaaaagcgctgccattagcaaatagtggttaagatagtgttgatgccatagcagtcccagccccattaaaacactgaataacgcaatcaccagcattacctgccaataaaccgtcgcacttgtaatcaatataggggctaaataaaaccagtggcggttaagcaaaccgggatgatggcttaagttatataagctccaatcatagccataatcctcacgaataaagccctgcattttttcattaacaaatgaccccaactgtggcttgatttgtttgagattagtctgcaaagtcctcgccatcgttcgtgtgattcgcggataggcttgcgtcaacgtgggcgccacccgtaattcgtggctgacggtagcttgtagtgccgggctataggtcccgtgacttttaacatctgtccccgtagccaggctgtataaagtttcaacttgggctggcgcaaccttaaagccatataaccagctgtcgagattagtcgctgtgaacatgagtcctaacacgaccgcactgtatgtgaggagctgacgtacttgaacgcggtaaaggtggtgagatttaagcaggacacacaaactcatcaaacccagtgcaattaaccagacgcccatgattggcctcagcatattggccacgacagtcatcacgatcgctaacgctaggtatagtcgtcgatccgtgattgtggtcgtcgtgagtgggactaatgcccgcgtaagcgcatacatcatgagtaggacgctggtgaaaaagaacggttcactaccatttaagagcgtgccgtacagccaataagctggaatccagtaaaaaatgagggcagccatgatgcctaattgtcgtgagagccaccgtgcgactagccagtaaattaagaccatatcgactaaagtacacccaatattgattagttggctgacaaaaaagttggccccgccaaaagctgcgactaaactgtagccgttcgcgatatttaaagcgtgcggaaaaacgacgtaattgccaacgataccatggtgtaacagttgggtccaggtgaatccttgggcactaaacgcggctagtgtatggtaattccagaaatctgaggtcgggtcgatctttaaccctgcaactagtggaaattttaagatagttaaccccatcagtgctgcaactaaccagctagtttggtggcggctcaaccaccagctgccaaggccaatcgtggcaccaatgaacaatacgaataaaccagcgcctatccaagcactgattgcgaggtgtaatttcaggttgacttgccagttggcgacaatcatccacccgagtaaggcagctgcaatcgtgagaacggtaattttaaatatcttatagcaccacttcatcggcatgcaccttcatcttaatatgagcgttttaagccagtatctggatattttgcaacgcgggtcgtaacaccatggcgcgttttagcccacgctgtttgaccgcgtaactgccgataaatggcgacgtatggcgtcaggctaatgatcaataagaatgcctgaaagcttaaactttgtttgagggcattcatgaatccaacgggttgtttcacgatggcacagttgcgttgatacagtgctgctaataccaaacaagccgaaaaagcgatcactagtaatgtcccgatagccaagtgatgccacccaacttgccaatgttgtaggctacggctcacaagcacgactaacgtgattagactggtcagtggcacgatacaaccactgataggcatcaaaatccaaaaggtcgtgtccaatttttgaaaatggttcagacgtcccgaacgccaaagtgctggtagataacgcatgcattgaacggcaccctgacaccagcgtacccgttgacgaaaaaatgggcgtagttgttcaacggcctcttgctggacaaccaaggtatgatcaaaggccgttcgcgtaccacctagcagccaggtccgcaaagtgaattcgagatcttcaagtaagctattcccccacggattctgtaacgctaaatctagccggacgaactgaccattacctgacgcaattccctgaccaaggcgattgcgtaactgttgggtagcattattaacccccatgaattcaaaattctgcatcttagtcagccagttgggctgattgtagatattcacgctcgtttgaatcatggccaactgtggttcttgttcaaagtgcgccagtacccgcgtcaaatcagcagtattcatgaatgcgtccgcatctaggacccccacgatcgtccgttgcggatcagattttagcgctaacgtcttatgaatatactggacggcagtgttgaggacggcccccttacctgcacgctggttgcccgtgcggtgtaggatttgtaagaagcgcgacgatgactgagttaacaacagtagactgtgatcagtcgaatcgtcatcgacggcaatgatctgggcgtgaacggttggtggtaattgttcgagtgattcagtaagttgcgtaatcgtgcgcgagatcacgtgttcttcattgagcaccggaatgaccaaaaataattcatagggtgtgggccctttttcatagctttgaatgggctcccgatagtgattgatcaacaataagttaataataaaatacaagtaaaaaacaactgaaatcataattgcaactctgattattatcatcataactcccccatcgaaacttattaagaaggtattatacgcatacttttttaaaatgcctattatttatgttatgaaaacatagtgaacgaatcatgcctattctttacgtctttttcacgagaaatttacacttattcggtagttagtgccgtacataaattggtaggatagtattattaactaataaggacggcggagattgatgaaaaaagcaacttggggattactcgcattattgattggacaaccgatcgtcatttacaccgcgcaacgggccctattaacgacgattccgagtcgctatggtctgctgggagcaatcgcttatacgagtgatccgcaccattatttggcgatgcttgagagtgcgcttattccggccttattaatcgcgcttaagccgctaaatcggtatgcggcaccctatacttggtcaacgattttgaaaaggacgctcggctggtggctatttggaatgaattggtttattctgatcagcctgtttgttcaagctagctggctaagctggggtatctttctttggtcactcggtggcgccatggtcctgctcgctaaattattaggtgtcctcagtcagtgagttaatctgaaacgacaaaaagatactgggtagtcagcaacatacccagtatctttaaattagttagttggtttaataactagtcatggtgtagtagtggtgtcaacatatcaatgatccccactgaagcacttggaaaggcaaaaatcttctgacttaacgttgtggcggagacgtgatcagcaataatcatggtcagtaagttaatcaggtctggtgcgccattaccatagattgaggcaccgacgaggtaattctcttggtcaaagactaattgtaaatcagcgtcgacctcgttttgatactgaaaggctaacagtttaccatatggcagcgcttgaacgtgaaagtgttcagtatcatgctgggcagcctcgacactgacaccgacttgggcgattcttggtagcgtaaagacgaccgctggaatgaccggataatcaatggcggcagtgctaccaagcagttggccggcaatgtagttagattcaaagatcgtggtcggggttagcttcggcaaagtcttactaatgacatcaccactggcgtaaatgtttggaatgcttgtccgcaaatggtcgtcgacgataatgccgtgccggtcggtcttaatgccaactttcgttagtcctaagtgttcgatgtttggaatccgaccagtggccgcaatgatatcatcactctcaatcttcaggccgctggcagtggttgccattaaccctgtggccgttttagtcacttggctaagcgcttcgccaaagtggaagtgcaccccggctgcctgtagatgtgtgatcatctttttaacgtgttctgaataaaatgcgggtagtgctcgatcggcaaactcaataatatgcacttctgaccctagtaacacggccatgttggcaaattccagcgagatgattccagcaccaattaaggtcaaccgtttaggcatggttggtaggtcaagaaaatcacgactgtcatgcatcaggtccgcacccgggatagccagcttggctggtcgttgtccggtcccgatgacgatggtatccgctgtatacgtgctgtccgctacttgaacagtgtgggtatcagtcagctcaccatgaccggtaataattgtaatccccaattgtttgaagacggccgtcatttgtaccgataaaggttgaatgacttgttgcttataggccatcaactgtgaccaatcgatggtgggcgttgtgttgacgccaatcccttgatattgtttgagttgttcagtcagctcgaagggaccgtctaacagaatcttagcatcacagccaaagttagtgcacgtcccggcgatggtatcttcttcaatgattgctaccttatgttgcgcatgtgctagggccactgccgcatgccacgttgcgtgcccgctaccgataaaaattgtgtcataatctgccattagagattcctcctaaaattatatttcagtcgcacgcgattgaaacggtcaataaaaaggcccgtttaggccaaatcctgtgataatgcggtaataatcttctggttcagggccagtgcttgttgatattcatcgacagtcaggtggtagcgactgatacaagttgcaatcgcggcttcgattggtgcttgttgttgcttaccctgcgtcgtgagatgaatgagtaactggcgccgatctgttgccggtcgctcgcgctgcaaccaccctgcgtcttccatgcgtcgcaaaagcggtgtcaaggtgttgctgcttaagcgcagaacctgacctaactcgtgtaatgactggtcgtcgtgttcccacaatgccattagtacgagatactgtgcgtaagtcagtttgaatggtgttaacgcttcgacataaaatttgttaaataaccgattggcattgtatatgctaaaacaaagttgattagcaaggtcaatttctggtgtcatgcggatgctcctttcaatcgcgtgcgattgattatcagcataagccccttgcccgtaaaaaacaaggggtaaataaatttgtaatctgctggtcgccacagacagcgactaattctaaacttgtaaaagcagttcactcaaaagcctttactgcccttagtcttgggtcagtgacttgatcatgagcaaatcggtttggcgatcgtcccccatcacaaaatcgtgagcactgaattgttcaaagccccacttcgcatagaagcccttcgcgggttcgttatgctcccaaacaccaagccagatcttctgcttatgatcagctttagcaatttgaatcgcttgttgcataaattgattaccgagcccttggtgttggaaagcttttcggatatagattcgttcgacttctaaagtgtctggacccattgcttctgattgtgccgcaccggtgtttaatttcaagtatcctaatgattcaccggctcgttcaacaaaataaaattgtgattcggattccgctaattcatgggttaacttgggcaagttatatgcatcttgtaagtatgcggccatattttcagaggtgttttgtacaccaaacgtgtccttaaaggtttcaatactgatttgttgtagtttgttcacgtcagcagtggtgagccgccgtgtcgtaatttgtgacatgatcaattcctcctatagtttcctagcaaaaacagtcggtcacacaatcaacgctgtaaatgcgctgatgatgtgactgactgctttatcttaacatattatttagcctttttaccccaatcagggataatcttaccatcttcactaatggcgagaccgtcgttattttctaactcagctgcgttcggatcctcgaagtcattttcaagcgcatccacgaaacgagctgtagacttaccatctagatcatcaaagaagaagttcacaaagccgtccaatttagcttggtcaacttgtggatgttgcaactggctgatcaactcacccgtgttttccgctaaactaccaggaataaaatcaaagtagttgaagtaaaaactccgggattgcatgtaatccgctaagtccggcgcaaagaaaatcattggccggttcagtagtgcgtattcgaaacaaactgatgagtagtcagtgattaattggtcagcaacgagtaataaatcgttgatctcacgataatcagaaacatcgtaatagaagtccgaatattcatatggtaacgttggtttgttttgcacaaacggatgaatcttcagtaaaaagacgtaatcttcgtgtaacgcttcgtagattgctctaaaattcaacatttcaaagggatagtatgctgattgctgaccattgccacgaaatgttggggcaaagagaatgacttttttgcccttgatgaatggcaaatcttgcgcgagccgttcccggattgcctgtttcttgggctcatcgaaaaagatatccgtccgcggaattcctagcggctgaatcttatccggcgcaattccaaatccttccgcgtatttatccgcgatgttatgcgaagaaaccaaggctttggtgtaattgcgatgatttaacgattgaaccttaggaccaccaggcatccccaaccggctgtaaccaaatgttttaaaggcaccgactgcatgccatacctgaatcaaatccgcattttcccggatatgcaatgggtaaactagtgggtaaaagtcatctaaaatcacatagcgactagtagccaacgctttagccaacgttcgaacctctttccaggattttttggttttaatacttggcttcaaatagaatgaaatcttaaaatcagtattgcgacgttttaattcctggtagataaactcgaaattaccggagattgtcacccgactatcggaaacaaatgaaatttgtttcttatgaatcggttgaaggcagtaccaccgataccagagttttagcgcccggcgtttaatggcacgcatcgctacactatctaacccgacatcttcagtaaactcattttcaagcgggttgacatcactcagtttatatgaagtgacctttaaggcttgggcggctaaattataccgaaaaattagactgtatgacttattgcttttcgctgaatagcttgtcattttagtcgtataatttaagtcttgctgtgtttccaccacttgaccaatggaggttagtctgataatccaaccattacctagatactgttttaattgtatcttgatttcataagtgcctggcgttagcggtttaccctcactgagtgtcgaaaagttgatgtcaccatgatacccggcatatggaaaatcagcgttttgaccacgaacgttgatcaacggaatttctaattcttcattcgtcttgctagtcaaaattaagcttttaataattcgttcagtatcttgttcgggatacttttcaaaccacgccattccctcaatcactaagtaagaactgttgaattccagcttagtcacttgacgtttgatcaatgattcggcatctttctcaattcgcaatgtatttagaaaatcaacgtcttccttggtcgtttgtgcgtcctcaaccagttcacgattacgagtatattgcggttgattccgtccgtatacgatgcgacgcgcgattcgttttagtcgttgtatcatctaatgttctccccctgctaatttttcaacaaattgaacgacccgttcggtattatgcccatcttgatgtggaaatgtcttttgctttaattcatgtacataagatagatccatatgatcaacttcctgattaataaaatcgacaactcgcgccgctttgctgaagtgcggtgcttgcaaatattgatagtaatcgacatagaatccggatgtttgcatataatcatcataatcaggcgtatacagaatgattggtcgttcaaaataactaaacgtcaatgataatgacgaataatcggttataaataaatcaatcgttggcatcagcgtcttaacccgctcagcatcttggaagatatgcacgttggatggtagcgtcatcgctgacagttttaagtacggatgcagcgaaatgtacagttcccatggaccggtcagctgctgacaggccgcaatcatgttgttgacatatcccatgacttgctgcttaccctggacaccttgccgataagtcggtgagtatagaatacgatgggcggcgagccgcggttgttgtggttgttgattaagcaacgagtcgaccattggcgatccagtggcaatgacgtgatcttgattgatagccatggcatctagataagcaggctgatcagactttgcattgatcaagacccaatcataatttgtgtgcggcttcatgacgctctgatcagcattcggtaagctgaggccaaactttttcaatgaaccaatggcatgccataattgtaccacttgattatcatcatgtttgtgaattgcgtaaagtggaaaaaagtaatcatcgatcacaaagacgtcagccctggcaatcacgtatagcgctttaatggaggcgagcaagaagcccacttttccagccagggtgcggtcataatgatagcaaaacacagtaaccggtttaacgttggcagtttttaggccctgctcaagagctgccaaattgtcgtttaattgaccgctgcgcatcgtggcaagtgtgatccgtcccttcttcgggccaaacactttataaaaaaattgatagaataaattaaagctcgtgtgtagtaacacgagctttaccgtctttagacgtcccattccatcacctccttgccccaataattagtaagtgcactatcaaagaagttggtaatgtcttgaatggaactcactttttgaacgtagccaactaaattttgcaaccgttcgcgagtgactggactggaggataaaatatcaacggcacgtttaaaatcttcacggctgctgcgactgacgcctcgtaacgtcaatccttctgcaaggacagaccgggtatcgataccgactgggttttcagagacgcccattagaatggcagttcccatcggttgaatatgctggataatttgttgaatcgctgcttcactgccctggccgccggtacattctaaggcctgactgaccttgacatcggctggaatgtcatcgaccaggtaagttttgtctgcaaatgagaaataatctaacttggattgatgccgaccgaataccagcaactgactgtctggaaaaatttgcttaaccagagtcgctgtaatatagcccaagttaccatcgccccaaataccgataacccgttggtcctcatccatggtactttcaagcttggttaatgcttgaacgccgaccgagaccatctcaatgaatgcggccatgtgtggatcgaagtcgcttggcacggtgattgcgcggtcgcgtcgtaaacaaacatattcttgcataaagccgtcgtagccgcttgaacggaatcttgaagaaggtaaataattttactgaatgattgaatccttcttaacgggcgtattaggcaccattgcgacgagcgtcccaggcttatactcatttcgaggatcataaacgacctcacccacggcctcatggatcagcgccattggtagcttagcacgtaatgcggcttgggagcgttggccaaagaaatagcgcgtgtcagcatggcagatcgataagaactttggccgcacgatcaaatcatcggcgtctacctcttcggcgaccgtttcaacttcaaattgacggggacttactaagcgataaacttgatttaacatcttatgacctcttttctactaatgctgatgcaacgcgtaagtcaaacggcgttgtgattttaaaattataattttcaccacgtactaaactaaccttttgaccagccagcgagcagattttgcatgaatcagacagtgatgccttttgttcggagctgagtgcgttatatgagtcgatcaatattttgatgtgaaaactttgaggggtttgaccctgatacatttcggaacgaaccggaatatcggtcacctgatcattagcaccgcggacgattgtatcgattgctggaacgacagtatcgactgctttattttctaaaacggcgacgatattgtcgttaatgatacgttgtgtgatgaacggccgaactgcgtcatgggtaacaacaacatcatcgtcttgaatcccgtaatgatcttggatatagttgattccactcattagtgtttcgttacggtcggccccaccaacgacaacgtgaacgcgctcatcggtgatgtactttttaatgatatcttcagtatggctgacccaatcggctggacagacgaccaaaatggcatcaaagcgactttcaagtgtaaatttttcgatggtatggattaagattggtttgtcggcaagcagcaagaattgctttggcatcggaacattgcccatacgagttcctttaccgccggctaatatttgtgcataaatcatatctacatgaccccattcattatttaaattatgtggataatgataaataagaattttatgttttttgtgaataaatatgaaagaagtgtgacgttcctggtaagaattgtttttttatttatttggttaaagtaagattatacgattggcttaaatatatctacgtatcccggcgctcaatttacaggtaaaagtgcctaaacataccttttaacaccatttatgtgcattaattggtatactaggcctagaaaaactaacgaaatggttgtgattatctttgactcgtctacgaaactctgggttggacttctctgtcgcgacgcttaacttcttggctaacgtcggtattgtcctgccctacgttctaattctctttaagtatcagcagacccacaacgcgaattacttagctgcgatcgtggtcttctacgtggcccgggcggcgagcgtctttgggactaaacacctaaacctcaaggctagtagttatttgctcatttgcctctggctgggtgcgcttggtagcttgttgttcagtttgacggctaacatcgtggccgtgctggctggggccctattcttaggatatacatccgccaacatctggccctattacttgacgatcaagttacacttgtccgcgcagacggattttaagttaaagaaaatttactggttaattttcttagttctcggcattctctttgtgctagattttgcgctgaactggggttaccggcttgcctttatcctactggcgctactatttatcattgcgttgcctgctggccgtttgttgagtcagttttcgctcgcattttacgatcaacacgaaatggcccaagtacgtcccatcaagccgtggcgcgttgtggtctttatcgtcttctttgctgcgattggtttactgacgttacttcgtaaggcgagcctacaaatcgcactaccggccgtattaggaattatcgtcgtggccattgttctactaaatctagaactagctgctgattggcaatccatgccggctaacaaactacggatcgttgatcggggctttttactgagttttgtcctactgtttaatagtttcttcggtgtctttgtctttggcaaaatggggatgtacctggtcttcgccatctatttgttgggctttgagactggccggccactatatttattattgggacggcatgacttacatcgtgccaccacgattgcgcgcggtggcttgattgtcggccatttgttagttgccacggcccaacccgttttatatgttgccggtttgctcctgatctcgttgtacgtcggttttgaaaacccagccattaatactagcgtttatgccactgaggttgatgatccagatctcgcaattattcataaatatcgcttttccacttatgggggcctgctttgtcaactgtgtttcttcggcctcttagtaattgttagcagttttcgacaattaaacttgctcaatttcttcaatccagcttcaaccgctttgaagaacacttatctagtagggatggtttggcccttaacggcgatttctctgattgttacgctggtcacgctctacggtcagtattatttcaaacgagcacagtcaaacgactaggcaccatctaaggaggctttacgaccatgatttttattgcaagtgctgcaatcatcctgccactgattcttctcgggggcctgaatttatccgcgacccgtggaatgaccattagcgctctggtggtgattattaccggctactttttctggcagattagtccaacggtcctcaccgcctcaattttgcaggcgattcataaagccctccccatcttatggatcttatttggcgccttactcatgctcaactgtttgcgtgccactggtgcaatcgaccggattaaccagggctttcaaagtttgtctgctgacatgcggctacaaaccgttttggtagccttcctatttgggggcttgattgaaggtgtctcgggcttcgggaccccagcgatggtcactgcaccattactaattgcactcggcttttcacccatggcggccgttatcttggccttagtggctgactcgacccccgcagcgttcggcgccgttggaacaccattgaccgtgggactgagtaatgtgaccgaaaaagcatccgtcttgaacttgattggcctgcgcatcacgcaactcgatttattcgttggtgcgctaatgccagcggtgctcattttaattctcatcatgtggtttggccctaaggcacaccgcttgaaaagctggctttccgtcttaccttgggcgttagtgatcggtttcgtttacagtctactggcactcctcagtgcttggctagtgggttatgaatttgtttcaatcatcgcaccgctgggaacgctggttattgccatcatcacgatccgattgcactggttgttaccaaagtcgagccagttgacgccatggcggacgaacgggatggcagcccagacgcctgcgcctagtccgatgaacctgatgaccgcttggtttccttacctgttggtcgttgtgctattactcgctagccgggtcgtgacaccaatcaaacaggttttgacccgttatgctaacttatcgtggtcccacattctaggttatagtcaaatcaactctgattgggaactcctctattcgccagggacaatcttggcggtagcggccatcattgggttactagtacaagcccgttcattaaagcccttactaccaactgcccattcggtcatccgttcgatgggcaacaccgcaattgccctcggtgttaccctgatcatggttcaagtcttcactaattctggcttgaatcaggccaacctacccagcatgccaatgtatatcgccaagtttatcgcgacctatctagctggtgtttgggtcatcatggcaccattcctaggccaattaggggcgttcgtaactggtagtaccacggtctcgacactgacttttgcgcaaattcaagctgatattgcggccaatgcgagtttgaagcccacgattatcttggcagcccagctcgtcggtgcggcagccggcaatatggtctgtgtccataatatcgttgctgtcagctcagtcgttggcctgagtggtcaagaaggcgccatcttacgtaaaacactactaccaggtctgggttacgccctgttaattggcgtcgccgggtggctactattacgtctcttagcttaactgaatgcgtataaaggcactaatcaccttaactgcggctgattagtgcctttatttcatgaatggattatactaaaataggattataattttcaacgcaaaggaggcaccgacatgcaagtgcgcttagtgccaaacttacaactcggtgaacggattatcgggccgacccccgaccctgaggccaatcgcgcgctttatcaacgttatgcgaaacgattacaggcgcggctaggtatcggctttcaagtctacctagatatgagtgacggttatgatttactgcatgcgcgtgattacgacaccgatacttgttgggtggttgcagcggctgtttaccaagcattaactgattctgccgtgatcacccaccaccgtatcatctcgctgagtgaccaagcacttatcttaaaagcgacgcagcccatcgaacaacaactgcgccaatctccgactgatcaatagtcgcgattcaccagctggcagtcgaatgagatgaaaataacgcctaaccaacaaaagtagcagtgtactagccatctctggctgattacgctgctacttttgtttgtcagctcactgcttaatttaacgagcgtagaaactagttattgattattgcatactggcagccattttgatagccgttgccatctcttgagccttgacttgataaaccactttaccagcttgccattggataacttggtctaaaggtccagagcctgacgaaatcgcgtcaaaagtgatggcgccgaccgactgtggtactggtaagtagacctgctcgaaagtagcgacggcctgtttagctaacgcgacgcccgcatcttcgtgcatcatgttcgcatgcacggtcaacgaccagcggccctcattccacatgatatatcgttgaccagcacccgcgtcgatatgcgcggtgatttgatgaccgagatcgacggttggcagccctgctgtggatttattatcacgataacccacctgctgggccgcggcattagttgtcgcataggtcgtcttagtgacagtcgcataagccgtttcatccaccacggccgccgcgttgaatggctgggcctgttgtcccacactataattgatggtgtaattggctgcgtcacctgaatagcgcatgttcaacttcgaactgccactagttaacccatcgacttgtggaacgagcgcctgctttcccaacgtcttagtcaattgttgattcaatgctgccagccgggtcgtagccgtgggctgggtgaccgacttgttagcggcgctggcggcccgctcacgcgctgttctagacgagcgcgtggctgcggtttgaggccgactactagtactactggtagccttagccttcttttgggtgctgctaaccgttgccttggcactcgtggtcgtctgactagttgacttggaatcctggtgtgttggtgatgaacagccgaccaacaagacggcaagtggtaatacgagcaagttgcgataattcatactgttcccctccccaataatcatgtcacggctgatacgtggtcgtcagcaacgtccatgatgtttgacttaattatagaatagaatgcactattaggggtgattattgcaccttacaaaaatcgccggccattagctggtaaactaattgggtttaccaagactgatgaccggtgattacaattatcgtttttaaacggtgcgatgcatacttcgttcgatgactaataaaatgacgaaccaaacgactgaaccgatgactgcccaacggttgacttgatcaaagcacaagacgaccgtcaccgcgataaagaaggccaaggtcgcgatgttggtaacagggaacaggggcagcttaaacggattatgcgtactgtcagtggttcgtttgtaaacgtaatggcacaccaacaaggcacaccaaacaatgatgaagttggttgttgccacgttagagatcaacgtgaagacggtacttggaatcacgtaattcaacgccacgatcaccagtaagatcaatgatgagaataacaatgagcgggcgggaacgttgtaacgattgacctttcccatccatttcggcgcgttgtcaccgtgcgcaagtgtaaatagtgttcgactcgtactgaagatggcactattacaagccgagagcgccgcggtcagaaccacgaagttgataatgctggccgcggctttgatcccaacgtcgctgaaaacttgcacaaagggtgactgactggtcgtgatctgattccaaggataaattgccatgatcacgaacaaagcgcccacgtagaagaatgagattcgaatgggtaagctattgatggcccgtggtaattctttttctgggttttcggcttccccagctgtaattccgaccatttcgatgcccgtaaacgcaaagataacgagcgaaaacgacatcaagaagccctggacgcctgttgggaagaagcccccgtgactgaccaaatttgtcaccgagaccgtttgcccaccgacatgggccgatgaaccaatcaagatagcccccgtcacgatcaaagcaatgatagccaccactttaatcatcgaaaaccaatattctaattcgccaaacgcactgacggagagcatattgaatactaataaaatcaaaataattattaagggtgtcacccactgcgggatccacggaaaccagtaacgaatgtagataccactcgcagtcaagtcagccatagctaaactgatccagcagagccaataggtccacccaatggcaaactcgaaacgtttacctaaatatcgattaatgaattctagaaacgaatgtaaacgcgtatccgacaataatagctcgcccagtgctcgcatcatcaagtaacagaagaaaccgccaatggcataagccaacaagatcgacggccccgcctgtttgattgctgaaccggagcctaaaaagagcccggttccaatcgcgccaccaagcgcaatcatctgcacgtgacggcgttttagtttacgggcaagttgctgattttccatatgacctcaactttcctttaatccaatttgataataattttcataaaaatacagattttttcacgtccattcattttatgataaaataatccgccgtgcaacttttgccaccgaaggcaaccgtaaaaaacgggttttaattgccatgcaggattttttctggtatctttaattactttgattattactggaataccagtcattagagctaaaggagtttacttatgccaactaaaacaactgatactttctggaaaagattcttcaagggcgtcgtcatcgccctcggttttattttaccgggcgtctcaggtggggttctcgccgccattctcggtatttacgagcgactgttgggctttatggcccacttccgtcgtaactttaaacgggacttctggtactttgtccccgtcggattaggaggcatcgtcgggattgccctgctttccgccccgctggaatacttacttgcacacgctcaggtgatcgttctctgggggttcgcaggggccatcatcgggaccttaccagccctgatgaaaactgcaactagtcgggcgccacgtgactggctcgacggagtttggttcttcgggaccttcattattagtgccggcctactttactttatgagtgagctgtttgggaccttgcccgctaactttggtggtttcatcgttgcgggagcgctgattaccttgggcgtcttagtgccgggactgagtccttccaacttgctacttattttaggccttttcacacccatgctgacgggctttaaaagactagatatcgtaggcgtctacttaccgatcgccatcggtggcatcctggcgatggcgttgttctcgaagttgatggataacctattagtgaagtttcattcccgagtctaccatttcatattaggtattgttctggctagtaccatgctgatattgattccgaatccatatgcggctgagagtatctcatatgcgcatgccacactcagtacctacctattcagcgccatagctcttgctgtgggaatcgcgctgggttactggatgagtgctttagaaagtaaatataaatagtgccactgaccgttggcaatcttgacgaatgccgttgtgcggtcacggttaaccaaaaaactgagcgtcggaatgtgaaaattccaggcgctcagtttttttggttaactactcaatcagccaccttaactttgattgcgacgtcgccgcggctgcaatcgtcgcaattcgttgacttgtgcttgaatctcacctaacatttgtgtttgcattttctggatttcaagcatgtttggttcatcttgttgaattaaatgatcgactttcgagtgcaggacccggatctcctcttcagacatcgagttcactttaaaatcattggccgcttgtagccgatcatactcagctgcccgattctgactcatcatgatcaatggtgcctggattgctgcgaccatgcttaaaaataaatttaataaaataaagggataagggtcaaaatgatggctaaaaattggtaagacgttgagcaacatccacacgagcatcaccacgacaaacgaaatgataaacgcccagctccccccgaaccgtgcgaccccatccgcgacccgttgaccaaatgtcaatgaactttccagctcgctattaacatcgacgacccgatacgtgtggttagcgagaatcttagataattgcgcattgaccttatcattttgttgataatcgttctcgatcatcgcatccatctttgctaagcgataatgtacgagatgctcactacaaatgaaactgctattatgggcctgcggaaaatcttttaaaatcatttgccgcaaactagtttccaattcttctaatcgcataccgtccacaacttggtaacgttgttgatcgacaatgcacactgctgttttcgccattagacacacacctttctctgatcccggcgtgagaattacgtgaacaatgcggcccccttgattagcaaccggaacctaacatcgcaaaaccacacctcacaccatctatttaattatacaaatttaaggcgcatctgcccagttaaagaccaccaatcaaaaagcgattattcgccggcctgaagtgacgagtttcctcgtattcagctcattgaataatcgctgcgttcagacggagagttcgtccatcaacatcatggtctgatactgaccatcgtctaagactgccaccgtctcgggaaactcccgttggtaattgactggtaaatcgaattccatgatggcatcgtgctgcgcatcaaaagccacggtgacttgcccattacgtgcgatcagggcaaattgcaggacccgtggcaggcgaacgaccccctttagattttgatcaataatatcccaaatgccatcaatcaccgcgctcggtagcttggcggctaaccctagcgttgcaaaccgttcttcatcttgatcaaacatgctaatcacctcattactcaattcggcttagttatcacgaacaatcactgcgacctctttttcaatccggataaataagccttgtgaatcctgtcgaaaatcattttctaacgtggcagacaacggtttaatgcggccaacgacggtgccagttgtcccatagagttcgatagtctgaccatctgcagcccacttaactgtccagtaactaccttctaaggcctcatcgacgaagtactgagttcccgccagcacagcttcattaatcacgctactttcatccgcagtcattcccgcgtctaattcccacttaagtttttgattaacttccaacatgtctcctggaatcaaattttgcataattattcctccacttttgttcatttacttaacatcataccacaatcacaactaatatcaggcattcaaacttatcggtatcagttgtcagtcagaaattgatatggtattgttatgataagaaaatgagattattagaaagtggtgaatgacgtgttggctaaattttcagcttggattaaccttaagcgcacaatttttgcagttatggttatgtcaggggcgcagtctgcgctttttccaagttgaatgaccactagccattgcgaagtcacgagcagctgacgacaatgggtcgtctttttttgtccgctcgtggccgctaaaggagtccaatatgttatcaccacttacccgtcgtaacctaaccctcagttatggttatgcggcctgtgctttttttggtatcaacaccctctgggtgatctttttacagcaacaaggcctatcactcgttgagatagggctatgtgaaagtgtttttcatctgactagttttctctcggaagttccctccggcgttatcgccgaccgctttggttatcggcctgtcctgatcattagccgcctgatggctatcggacacgccctcatcatgttgacggctcacagtctcggctggttgctcctagcattcatcctacaagcctgggcgtataatctccagtctggtacgattgaagcggcacaatatgacagtctcgtcaatactcaggccacgcaacattatccacgcgtcacgacgattctcaacacgacaatcgaagtggccgatacgttgggtgtcgtgttggctggctggttaatgccccagcatctttcagtgacgtactgggtctatttagcggcagctctcattgccattctggcaatcagtgggctgcacgttccccagcgccagttgaccaagactcattcaacacaaccgtcgttacgaacgatccttcgtgctgccgcgcatctgttagtgacccaacgtcgtttacggcttttaatgatctttgacgcgctcttttcggcactcggaacaacttattactattactttcaaacagtgatgactgctcagcactttagtgggagactaatcacgacgatcctcattgcgagtatggccctcaatattgtggcgatccaactgacaccttggctacagcgacatcaaacccaacatcagttactttacgggctctgcctaagcatgattatggccctacttagcgcatttagtcacgccatcggtctactggtcctcatctatttagtcatcaatagtttgatggcactgattgagccactgttttccaactactacaatcagctgattccaaacgggcaacgggcaaccctactgagcgttgccagcatggtctttagtttagcgatgatcagcgcttttcctctgattggctggttaattcaacgggtggggtttgccgttactttcggtagctgtggcctgctgacattgatcgccttgctgagtctttacggctatgcccggcgaagggccgtccagcattgaaaaccataactaatcactgacattactgctgagagatgttcccccacgacttgaccggttgcttttgaccaccccatactaatcgcaattgcgtcaccattaatcatgcacgtgaacggtaaagtgaaggcccccgagaatcgaaaggattcctgggggccttttccgtcgtttggggctgttcggcctattagctagtttgagtgagccagattcgatcgttcaaactgttgccgaatttcctcagcgatggcgcgcattcgctttggcgtatctgcttgtgccagccgatagccgatatagtatggtgagacattaaatagtgggaccactttggcaacaatctggtcatcccgcggatagaaaaataggttataactatcacactgcccatgaaaatacgtatttagcgtatactggacgacctgttgcacagcatcggctaacggtgcaatcgcggtagctggagcagcaacgttgatttcgacaaatcccatgataggccgatcagaaacagttacttggacctgatcgaccgccaacactgaatacccagtcaaattggctgctgtcacgttagcgtaaccatcggcggccattaaaccaacgatttgcatgtgtggatgccgtaaacttccacccgagtgtgggccaaaatttttatagcacaacaccgatttgaaccgaccactcgcaattgtggcttgccagtgcttcagagcaaacgcgaagacagcgcggttttgtgcggatgagtaagtagcaatatcgccatcatggcgggccgcctcgatcacgatcgtttgccaggtagcttgcaaggtcggaaatttattcaatagccagatacgatctgcatcttgcgcgataatatcagtcaactggcccggatcgcaaaaaggacaggcattgtgcgggtgccggatattttctggcttatccttcgcaatggccgtatcaaagattagtggctggtttggcaaggtttctcaacttctttcatgaaataagaaaacgggtccgaaacaccaattaggtgccgacccgtttgccttttatacgcattagttcattggttccggtgtatcagcgcccggaccaaactggacatccgccatcgtgatccaaacaacaaattccgttgaagccaaccgccagtactgcggatccgacgccggcgggagtgattgttcaaagagcgcaatagccaacgcgttcgccgcattgtccgcagcaacttggacactcgccccaaaggtctgggcggcaggaacgtctggaaaacggacatcccagtaggtgccttcatcacgaaaaatggctggatacttaacttccacataattgtgattcaattttatcactcacttcttacaatcattttaaggctattataccgaaaacggtcgcaaaagcccagctcaaacatcatgattgcaattaaaattaatcagcctttgacacgtggtacgagccattgctatccgtcgtgaccttatagttcccactgattgagttttcaccatagtccttcgcgtcatttaaattatcgtatgtcgagccggcatgactactactgctactcttttcagtactagttgacgccgtttcactctttgatgagctgctggctgttgaagtactgtgagaggtggcgctacttgtggtcgtttgatgactggtcgtcgtgctatgcgaactagctgtcgtattgccagcggtcgtattagtggcagttgaactgctatacgcacccgtcgtttctgtcccatctgtgctagtgtcggcatccgtacttgcagccgtcgtttcgctagtactttcactacttgagcttgaatgcttcttctttttcttcgatgagctagatgatttcttcgaagatgattttttgcgcgccttgctgctacttgaggaactcgtggtttcgactaagtcttggttgctagctgctttgacaaagtaaacgactgttccaccgagcgcaatcacgattaaagccaatagccataacgaaacgtgatgttttttttgcggtgacttaggtgcttgcggtttctttggatcgttcggttccttaggtgcatgggatccctgtgaactcgccttacgtccccgcttgccacccgtagcctctcgcgcttttaagcgtgacatgcgcgtctgtttttgttcaggcattaactatcgcacttcctttcttgcttccgccagtttaccatattttggcgggcttgtcttaatgcttaataaaagaaacaatattatttgtgtcgatttttaatatcgacgttcattaattaattgcttgtaaattatcataatagttggcaagtacaccataaatatatggtaccaaccataactggccgattccagccgttaagatactgagaagttcccagcccaaaaagcttaaatgcaacacgaataactgccacttgtgcccgtgcatcaactgacggctacgggtgaccgcatcacgatagcgtggccgtgcttgaccagcaggtgttgcagctaacaagtccttatacgcataaaaagtctgtgaataagcgtacgccttaataatacccggaaccaccaatagcaggctccataggaagataagcacagttttataaataatcagaccgaccagtgcccacccataacgtttcgtgaacccgaccgttgagtcactgaccggatggatctggcgttctggttgtcggacccagtccaacatcgcataactcgtcccaatccgaaagatttgaacgaccagccagacaccaacttgaaccagtaaaaacccagctattacagctaaaatcaacgatatatcagaaccagtcaaggtccccaactgcttaaaagtcgtgtcgtcagtcgtggaactgcccgacgacacgcgatctgaataattggccatcaccccgaaaatcgttaataagctaataataatacataataagatggcatctttccaacgccccttaaagagttgcttaatttcggttttaagttcggccctcgttttttgaatcattgcgccactcctccactacttgtttaatttagtccattttccgtgttttgtccccgttagtcaacggcaaaaccctaaaaaagcgctggcaaaatgccaacgctacgagttgaatcataataattgcttatgcataatcacaacgggggccccatcttcatcatacgggccggccgtaactcgataaccacacagttcgtaaaagcgctgggcagtgagttcaccatgaatctcgccatgagtaaaaccacgttgcgtggcccactcctcagccgctgtcaataattgacgaccccaaccatgaccgcgataggccttccgagtgcagactcgaccaaatcgcatcacgtggtcagcttgtggttctaagcgtaacgttgtaattggtaaatcaggctgtaaatatagaacagcgtattcacgctggtctgtatccttgacgtcaaattcaacgtcagcactgattccacgctcttcaacaaatacagcctgacgtaacgcgtaggccgctgcccgattggctggtgatgctgaaaaaataattttcattttagtaggccttatcaatgtccttcaaccaggctaacgctaatgacttgtcacctaaatgggccccaatcactggaccaaagtacgtgatatcgatcggcatgtctggataaatttgttgtaacttttgtttccaatcttcagcggcagccaaattattcccctgaacgataattgctcgcagcggatagtcgacttttgactgtgcttcagcaaagaggtgctcaactcgcgctaaagctttcttagttgaacgaactttctcaaaggcgacgatttcatggctctgatcatcaaaagtcaacagtggcttgatccgtaacacgcttccaatgaaggctgacgcattcgataaccgaccaccccgaaccagattttgcaaatcatccacgataaagtattcgcccatcgaggcccgcagatcatctaggcgtgccaggatttcttcaacactgtgaccagctttagccatccgcgcggcttcaattgccaaatagcccatcagacggaccgtgatctgggagtcatacggataaagtttgatattatcgaccatatctcgcatgttcatcaagctattataaaaaccggaaatcgtgctagcaagatgaatactgatgactgcatcataaccttgttcacccaagcggttatagaatgccaccatttcccccacgggtggttgggacgtacttgggaacgacttaaatgatttcatatttgcgtaaaagtcggccgttttaatgtcgacaccttcttgatacacttttccatctataataaccggaatcggcacgacatgaatatcgttgtccgcgacctcttgcggtgtcaaatagctcgtgctgtcagtaacaacagcaatcttcatgacttacacctacttcttatttaaataataacaaatatcatagcataaaactaagttatactctaccttcgaccgtttggaaagtcatggctcgagaattcggctaactgacttgtttaaccgattgagcagaatccggagaaggttttgttcatcttgtggccatttgtcaaaaacttctgcttcaaactgttgataatccgcattaatcttggtcaatgccgctgttcctgccggcgtgaccgtgtaaacaagttggcggcggtcacgaccaatcgcttccttactcaaacgttcttttttgactaggctagccagttgccgacttaatgtagatgtatcaagctgcatggctgtcgccaatttttcttgcgtattggcccctgctgccaactggatcagcagttgccattccgcaacggtgattccttgggccttagtaatttttttcaacatggcagtttgcaacttagcggtttccgctaaggccgttaaacttgacttcatgacagttcattcctctcaacaataattcacattggtccattgtgacttgatttaccccgcctgatgattaaaaacgtgctaattttttagactcaaaaaaactcaactgagctttgctgacgcaagcacgcttcagcgtaaactggctgatccagtgcgattccatcgtaattagcacgctttaaccatcacttatgcgaatagcagcacccacaatgaatacatttgtattatacaatatagagtgtgtaattacgactactttttatttaaaataccgttaaagtagtttttgcatataacatttttagattcaaagcgttcatccgctaattgcttgtttgacaactagcagcgtcgacgcctaactttatgcgtcagcgtggggcgctaacttgtttttacctgttcaaaaacggtatactagtacccggttaactgtatttttacagtgataacgaatatcttagaaagcgagtgatcacatgtcctttgatggtttatttacccatgccatggtcaccgaattacgccaaacactagttggcggccgtatttcaaaaattaatcagccataccaaaacgagttgattctgaccattcgtgccaaccggaagaatcacccagttctactatcggctgacccgacgtacccgcggattcagacaacacaaatcccttacgttaatccggccgtgccgacgaacttcgcaatgatgatgcgtaaatatttacaaggtgccatcgtgaccgatgtgtcgcaggtcgccaacgaccgggttgtgcacctgaccgtgacgacccgtaacgaactcggtgatgccgagacattgacgttgattattgaaatcatggcacgacatagtaacgtgatcctagttgataatcagactggtaagatcattgacgtcatcaagcatgtcggtgcggatcagaatcgctaccgattacttctaccaggcgcgacctacatcgagccccccaagcaagacaaacaagacccatttacaccgaatactgattttcacaccttagtcacggattaccccaacgaagacgtgttggcaaaacaattgcagcagcattatcaaggattcggccgtgatagcgcacaacagttagctgccgacttgcatcagcctggcgaccttgatcaccattatctggcctttttggcacagtttgatcagccgcaggcgacgttgatcaccttaccaaatcataagaccatgtttgccgcgggaccgtttgaccattttggcaaagccacgcgccagttcgactcattgagcagtctgcttgatttttattatgcagacgcagcccaacgagaacgagttcaacaacaagccggcaatctgattcgggtggtcaaaaataacctgaagaagaatcgtaataagctcaaaaagttggaaaaaaccttagctaacaccaagcaggccgatgagctgcggttaaaaggtgaaatcttaacgacctatctacatgaagtcaaacgtgggatgactgagatcactttaccagactattatcacgataacgcgccgttaaagattcaactatctaatcagctctcgccttcccggaacgcgcagaagtatttttcgcgttatcagaagcaaaaaaatgccgttggcttcgttggtgagcagatcagcttgacccaagctgaaattgattatctggacaatatccagacccaaatcgagcttgctagtcccgctgacatcaccgaaattcgtgaagaattgacgcaacaaggctacttaaagcaacacaagactaagaaaaagcaacgcagttcacgtaaaccgagtcaaccccaggaatttactgcgagtgacgggacgccgatctttgtcggtaaaaacaaccggcaaaacgatcagttaacattgaaaacggcccgtaagagtgactattggctgcatacacaaaaaatcccaggctcacacgtcatcattcattcagatgatcctagtgaccaaacgctcacagaagccgcgaatctcgccgcatacttctcaaaagcccgcgattcagcaaccgttccggtcgattacgtccaagttcgccgaattcgcaagcccaatggtgccaaacctggctttgtgatctatgaaggtcagaaaacattgtacgtttctcccaatgctgagcttgttgaacaactgacaccgcacgcgtaaactggttttaagagtacgcagtgatcaatcattaaccaacaaaatcgcgcgtccaagataaaatttctggacgcgcgatttttagtacttactggcagtgcttcaaacggtaacggttcaaacttcccgccgccgaaagaatagcaggcctaacactaagaataaaataatgtatgcaagattgccccaaaacaactggacatccgtgagattggtaattttactcagcgtcggtaatcccaactgggctgaaaagttgaacatgttgagtgggttccatttgagccacgtatacttccgaataagtgcgatcatgggaatattaaccattcccagaacaaagtatccgatgattccgaccgcgactgccgcaccagaactcttgaaaagagcagcaattagcagcactagacttagcagtaaccacgtattgagaaattcaccaccaacgcccgccaaccaatcatgccaaaacttggcccgcgtaaagatcgcaaatttatcatttactaagcagactttaagtaagatggcaaacagactgctaccgacatacaacaatagactgtaggttaacagcacgagccacttactaaccaaaacgagtggtcgtgaataacgctgcgttaacacgtgcttgatcgtcccaaattgaaattccatcgtgatcatcgtggccgccgctgctaccataaagaagacgatgaactgctgcgcttcaaaattagcggcaaacatggttttggcgggaaaaatcgtcggcttgatccgcgccaaaatcgcaaagatcagcgctatggtagccaatatcagtccacaccaaatcgtggacttcttcttaaatagttttgtgagttcttgtcgatataacgtcatcatcagtaccactccctaggcgctggttgtcgccagtaattttaaaatcgtactttccaaatcagccgcctcatgccgaacatccctgaccgtcagtccgtgactagtcagaacatggagcacatctgctacctgatggtccggtgctaagtggactttcacaaccgtgtcggcaactacttgatagccggccgccaccaaaaccgctttcgcctgaccgtcatgatcagttttcacagtgacaaaatgatcggtcgtcgttaacagtgctgtcatcgttgttttctcaataattttaccgtgatcgataatgactaaatcgtctgctaacttttgcaattcactgagaatgtgactagaaatcaaaaacgtgacgcccacctgtttttgcttcaagataaaatcgcgtaactccttagtaccttgtggatccaaaccattcatcggttcgtccaaaatcactagttgcggccgattcaaaaaggccagggcgacaccaagcttttgtttcatccccaatgaataatgacgcgctttttgatggatatagtcggtcatgtttagtgcggacaccaccgccgccaatcgcgcttgggcatcgggcccgtccgcaaacaaacgcaagttgtcccaaccgctcatatacggataaagactcggatactcgattagtgaccccaccgtcgccaagatgggatgatgatcgaatcgcatcgattcacctgcgatttgaatctcaccatccgtgctaagtagccctaaaattgctttcataattgtcgtttttccagcgccattcgcgcccaccaggcccacgatccgtccctgggtgcattcaaaactaacgtcacgcaaaactggctggtggccgtaacttttattcagatgtttaactgttaaaattgcatcggccatttaaatcccctctctttcaagatggcaaacgttctcataagctgtcgacacgttgcgtccctccttaaacgataagtaaccctgcctaggaaagattaccattcggacgttactgaattatagctcgctattcatttaaatgttggttttctcgggcgcacaccagtattttggtacttttaacccccaccacgcgaaacgacgattaactaaccaatcaacgtcatcatttttgtcacgttagggctaagccacacacccacttaaacgcactagttgtgcgcatgaatcaaaaacaggtgaacactagatcggccacattgccaacctagtgttcacctatttttcgcttttgaaatgaaatttttggcgccattccgggattagctcaggtcaataaaccagatgatccagcacggtccagtccgggtaggtctgatcgcttgggtcaaaccgcccggataacaacactgcctttgcttttaaaaccaacggtgacgcattagcttcagtcaacgcatgcaacggcacccgtgatgctccatgcgaatcttgaccatcaaagttagcgacatgttcagccagttgcccagttgtccgggtcactcggtaaaagaccgccagatgttggttcatccgccactgcttgaactgccagggataccgaaaactcgtgatacccaattgcgtcaattcagtcgggattaacccggtttcttcttgaatctcacggcgaatcgcggcaagtaagggctcaccatcggccaaactgccacctggtaagtcgtagcgattcgtatagggaccaccaaactttttagtaacgaccaacgcatgctcatcgccaataatcccataaacaccaaatgcacggtgataagtttccattgtcccacgtcctttcacgtttaaacagcgtcgttaagcgtaagcgctagctatcttggtgtcaaggcaaacctaagcgtttactgtaacggtaaacatatcagatgattgtaagtttactattttagtaaacattaattcatcgattgtgtttacaaatacagtaaacagtcttataatcagtaacattggaggtagcctcatggacttaactagtttaacgattgatgatttaaaacgcggctggcatcaaacagccactgcccggtattgtaattactgtgatgctagctgggaaacgactacagcggcggccacgatcgaacaacacttaacgatcgtccatggtggtatccagtcaccactgattcacttagcgagtcgctacaatactttaaccactaaacagcaaaatttactgactgcttttgcgactggcatcaaggatgccgacttggctaaacaatttcaattagcggcggccacgattcgacatcaaaaatttacatttcgtgaaaaagccaaacaagctaaattgtacctggccatctatcaatccgtctttgagagtggtcagacgcccaatgatttgattgtcctgccagaacaacctggaattattgatgaccgctttgcgattactgaagacgaagcggtccaaacattgaagcagtacttcaactttgatcatgacccactacaattgaagcggtggcccaaaaagcaaaagacgatcgtcacaattctaacgcggattattgatgaaattccgatgaaccggccaatcaatgaagacgagctcaaccactatttacgaccgatttattttgattacaccacgctgcgtcgttacctgatcgactacggcttcttaaagcgtaccgtcgatggccggcaatactggcgcacaactactaaggaggactgaaccatgcaaccagtcgaaaagcatcgcttacaacaaaaatacaaacttgccccaacttattacggcgtcattcaaattaccaacgaacgcaatcataaaatttggattgacacagtgcccaatttacacaaccgctgggccttttatcaactaaatcttaataaaaacttttaccggtccaacccgttacaggctgattggaatcaacaaactgccgctgacttttcatatcaaattctgtggcaaaaggaaacgaccgatgttactaatatgcgtgccacgctcaaagcactcaaaaccaaatggctgcacgatttacaaccattcgatgaccatggctataatcggcgccctaaagattggaaggaaaactaaatgaccaccactaaaccaaacatgcacgccgttgctattaatcctgcagcctggccgcgccaaacttatttttactatttcaccaagatagcccccagcggttttagtctcacggtaaatatggatattaccgccaccctagcttggactaaagcccaccacgttaaattcaacgcggtatatctatacctagtgagtcgcttgttgaccacacatcccgaaatgcgcatcggctatttgaacgatcaactggtgacctttgacgtgttacatccgtcttatacgatcttacacgctgaccggacaatggctaatttatggacgacttacgacaccgattttgaaacgttctatcaacactatttagcagaccaagctgaatttagtgcacttccagggcccatgccgaaaacaccacaaacacctaatctggttaatatcggctgtcttccaggagtccactttagtagctacacgcccctcccattcaaaccactagatagtttctttccaatttttcaggctggccagtttaagaaggacgctgacaaaacaatcatgccgctaagcattacggtcaatcatgccaccattgatggcgatcatctcagtcgtttttttaatgaactccagtcatgttgggaacaaccaacacaatacttagcctaaccatatagtcaaggcccgttatgtgcatttgttatccagcttaaacaccgctcgtcaggtctttttttgaagcgaatgagtcactagcttaatcagtgttatttaccggtgtttgttcgctcatcagattgcgcctttcttcaagcaaccacaccgtaaccgctgtccaagtagtgccggccctcgccagtacaattctaagaaattcttatgctagccttatgaaaacgcagtagttgagtctgcttcaaatgggtaaactaaagacattaattaagaaaggaactgatgtctatgcgtcattcacaagtcttaacgatcacggtgaaacaaccgcggcctcggagtgctgatccagctgtcatttatagagtcgatcgccatccttactggcattggaacctaatgaactaataaaaacgaaccgtgcactgaatcgtagtgggctcaaatgcgcggtattaaaaacaatcccgttcgatcagccgtgtgggccacctgattgaacgggattatttttggttgcaagctctgcgggtatccggtacactgaagccatcaatgaatggaggaaatgccaatggctgagtaccttgacgctgacctagctgttttgacaccatatctggaaaagctgggtgcaacaccccatcgcgcccaactgattaccttgctcaactgggtacacacgacttttccacaactcaaggcacgggtcgcctggaatcaaccgatgtttactgaccacgacacatttatcattgggttcagtaccgccaaggatcatctgaacattgcacttgaatcacatactttggatagctatcggaacgcgatcacggctgctggtgataaaacaaccaagatgttatggcaagttgctttcgatgcgccaatcaatcacaagctacttgcagaaatcattcaatataatatgactactaaacaaaccatgacgaccttttggcgcccttgatgcgtcagcgttcacgaccccgctttcatgcctgaatccgagtcgtgagcgctttttaatgcttaaactcagactgagtgtcaacgcacttaaatctagttgacataattttaatttttatcagttgcagccaaattaatgattttttcaaatgtgaagcggcccgcgtcatactggtacttgatgactgcacagttatgtaacacgatgccttgccgctcaatttcgtccattgaaagccattgccgcaaaaacatgaagctagccccaccgtgactgaccgccaacacctgatgatgatccggacgtgccatcaccgccgtcaacgttttgacaacgcggtcttgtacctgcaaatcactttcgccaccgtactgacagaaaaagtcaccatgactgcggcgcacggggtccggttttggatttaacacttccgactcaccttcgaaaacgccaaaattccactctttgataccctttaaacgctcataaggttgcttggtcactaattctaacgtgtcactagctcgttcctgcgttgagctgtacgcatgatcaaacgtaatcccttgcgcctgaaaatacgcacccacgcgttgggcatccgcaattcctttgggggttagcggcgagtcacacgccccctgaatcttcttcagccgattaaaaagtgtttcaccatgccgcatcatatataatgtctttgccaatttaactaacctgcctttaatttgtctttagataagcataccataaatgaaagcgctatttaaagcgtcctatacattggccagttagagcctacttttgcctacgaacgcgcaaaaaagcacaaccagattttagtctggctgtgctttaaatagcgatattgatcaaaagctcagactaaaaatccgtatcttcatttccctgattcaacgctgtcaacgccgcctttaacgtgtcgccatgtgcaatcaccgtgccggtagcatggcccggttcaccggtggcttccacttcatcataaatttgtaaatgattgtagggaaatgtattcgcctgaacatagactggctttagccggttaacatccggatagtcgtacatcaccttagtcagtgcttcgcctaattttacgtgaagtaataagcgggtcacgctcgacccactggccttactgattaacgccatcgtagcaatgctcatcggttcaatcgtagcaagttgcaaagccgtatcagcaattgctaaccgaactgtatagagcccgggcgcacccatggcgagcactcgttgcttgatttcagcgtgtaaagctgtaattgcctgattttccgccttatcacgaatcggaaatacttggaccgcaccacggacattgccacgcaaattatttcccgcaataatttcacttaccccaaaaattgtcacatcggtgccgtccgtaatcacctcgacggcgggcgaatcgttggtcttgatctgctcgcgcggcaagctattgttgatttggatcacttggtagccatcctgtactaacttctggcccagccggtaatcatgataggtggtaaaaacgatcaacggcttttcaatcgctaagacgtttaaaatatccgaatactgtttaggttcaacgtaacgttttttggccaatcgcggagtcatcgccacactattagggttagcgttgatcaaaacaggctcataatcagcctttttcaagtagaacaacagttgtgagaccaaatagtcgttcccatggttggttccgatccggttagcacccgtgccaatgacaacgactcgccgaccagtagacggttgactttcgttatcaaattcgtacgtggagtaataagtactcgtctgctcagtaaattccccggcagtcggttcgacctccttaaaagtcggttgaatttcattttccaacgcaaagttgcgaaccttagccacatccgtttgccaggcagcggccgcatcttcatcggtaaagccaaaatatttggctcggcccagcgcgtggacgtcaaacggccgttcacgcaaggctcgttcaatttctaaaatatgactcagtttataaaagtaaaaagcatcaatcttggttagctcggctaattcatcgatttgataaccacgattcagggcttcaagtaaaatcagcatgcgcccagcttgcggatgaatcaaccgttggatcagttcaccctccgaatagttctggggtcgattagcaatcacgtgatagcgagattcgtccgtagaccgcaaccccttcaacaaggcttcttccgttgaacgaccaataccgatcactgagcctgtcgattccgtcacggtgtctagttgatgactaactttcttcaacacattaaacggccaaactggtatccggcaaacaatatgatctaaaacgggttcaattaaagctgtttgtttacggtaggctccgggcagtttgacctctgccaaacttatcccgaccattagattaccaacaacttgtgctaacggatactcggttgcccgcgcggctaacgccatcgtccgatcaaagtacggtgtcactttaatcacgtaatagttttgcgtggtcggatcaagtgcaaattgaacgtgacaagagccggtcaagtgtaacttgcgcatgatcttgagtgtcgctgagcgaaactgttggtattcttgatccgtaatcgtttgcgttggggcaaaaacgattgaatcagcggagtgaatcccaactggatcaaaattttccatcccactgactagtagcgcggtgtccttctgatcacggacggctacaaattcgagttctttatagccgacgatactctgttcgacaatacattgtttggtccctgaaactttgaatcccattgctagtgcccgttgcagttcgtcttcatcttcacatagttggcgactcgcttcgattcggggtgcgacagacttgacgatcactggaaaaccgacgtggcgcaccacggccatcgcctcagtcgtgctagccacaacttgtgaggcaatcacgggttcacccatatctttcaaccggttgctcatcagcgctgggttgacgatcatgtcgaccacgtcttgatcccactgtagcaacttcacgtgattattttttaacacattgttgcgaatcaacccttgaattagggtgactgtttggacgccaccaagtgaaggaatgaggccatcaggctgttcagtttcaataattttggatagtgcggcgacagtcagtggttccaaataaaccttgtcagcaaaccgattttcagccgccacggagtaagcattgttatcgacgaggacaacagcaatgcccagacgccgaattgccgcaccgatttgggtcaccgccgcgtcgtgttgtccctctcggccaatgtcattatgcccagcgccaataatcaacactttttgtaaggcttgattgttcaccagattggcccccttgcttgttgcatcgactcaacaaattcatcaaaaatatcgcgcgtttcagtcggaccaggagcgccatctgggaaaaattgcactgaaaacgctggaaagtcccgtagacgcagtccttgaatcgtcccatcgatcaagtcaacaaatgtcgtgattaacttattacgatcaacagtatccgcatctaccgcgaacccctggccctgagctgcataaataatttggttcgtaatcacttcgcggattgggtggttagccccatgatgttcaggtgataatttcataatttgagcgccattggccatcgcaaatagttcgtggcccagtccgatggcaaacagtggcacccgattttgaatgttcttgatcatctcagtcacactgactggtaagtcctgcggtttgccgggcccagtcgatagaatgacgccgtctggatctaagtttaaaatttcctcagtcgttgccgtataaggtaagaccgtgacgttacaagcacgcttactaagttcgcgcaaaatcccgtgtttgaggccaaagtcgatgaccacgacattgagccccgtccccggattaggaaatggtttcggtgttgcgaccgctgccacctgttgattagtcagcacggtcgcacccaattgatcaaaggcatgggcatctgcaacgtctacgatactggctttcatcgggccacttgctcggagttgcttcgctaagtgccgtgtatcaatatggctgatgccaggaatattttgttgctttaaatattgatccagtgaccagcgccgctgccggttggtcgaaatgctagcgacatcccgaacaacgacccccttaacggtcggtaaaattgattcgtagctatcgtggttgatcccatagctcccaatggttggctgcgtaaaagcaacgatttggttatgataaatttgattagtaataatttcttgatagcccgtcatactcgtgttgacgacgatttctccggtagaaaccgctggcgagccaaagccttcacctaaataggcgctgccatcttcaagaatcaaatagcggtctgccattgcgatcccttctcatctgtttgactttgtcgtactagttaataatttcaataccatcgtgaccgtcgatttcattgaccgtcactttgatgcgttcttgacgcgcggtgggaatgttgcgaccaataaaatcagcgcgaatcggcaattcgcggtgaccacgatcgactagcaccgccaaggcaatgctctggggccgaccgccacccattaatgcgtctaaagccgcgcgaattgttcggccggtaaatagaacatcatcgactaaaatgacccgcttatccgccaccgaaaacgttaactgatagtccgttgaaagccgtgcttgatccagcggctgatcatcacgaaatgccgtgatgtctaactcgccaactggaatcgcagtaccttcaagctgttgtaattgggctgcaatccgctgcgcaatatagacgccgcgggttttaacgcccactaagacgacatttttaatgcctttgttctgttcgataatttcataggtgatccgggtcaatgcccgtttcatcgccattgaatcaacaacttctttttgcataattgcctcccaatttgtggttatcgcttttttgagcaacccgtacgacaaagaaagacggccggacaaggtgtcacggccgtcgacgaaaagttattgttaacggtttgcctttcagtctcgcagggccggattaaaggacgctcattactgttagattaatgattcccatcggttttgtcaagcttagccaaggttgtcgtaaagattggtggtagtggtgcttcaaaggtcaataagtcacccgttacggggtgcttgaatcccaataatttggcgtgtaaaaattgaccgtgccccttaatcgtctttttggggccgtacaggggatcgcccaccagcggatgtccaatagattgtaaatgaacgcggatttgatgcgtacggccagtctccagccggcaactaatcaaagtatagtgctgataacgtttcagtactttaaaatgggtgactgctggtcgcccggtcttaacgatggcttgctttttgcgatccttcggtgaccgaccgagtggcgcattaattgtccccgtatcctctttaatcactccgtgaacgagtgcgacgtattctcgtaagttagttttcgccttcagctgagccgctaacgattggtgagcccggtcattctttgcgaccatcaataatccggacgtatctttatcgatgcgatgaacgattcctggccgaaattcaccgttgatcgtcgacaacggactatgatacagcaaggcattcaccaaggtatggttagggtgcccaggggctggatgcacgaccatcccctgaggtttattgacaaccaagacgtcatcgtcttcataaacaatgtctaatggaatgttttctggctcaatcgttgtttgttgaaccgtctgtgcggcaacgacaatttcgtcacctggtttgacgtgatacttgctcgcctcgagctgaccattgaccgtcacctgatccgttttgatcagcttatcaacttgcgaccgcgtccagaccgactgtagtgccgctaacactttatccaagcgccctgtttggtcagtaatcgtgaattgttgttccgtggtcgctcctgccacgttatcagctccctgtaacttatttttcaaaactatcatcccgcagcacgccgatcaagataaaaatgacgcccacggttaaacatgaatccgcaaaattaaaaattggaaaattaataaaatcaagttggaacatatcgacgacgtacccaatacgtaaccggtcaatgaaattccccaaagttcccgcaatcatcagtgaaataccaacctcatatagccatttgccacgtaagcgccacagcaagtagcccatcacgatcaaggcaatcactgaaatcaagtagaagaaccacatcttgccttctaagatactccaagcagccccgttattatgtaaatttgtgagtgataataacccggtaacaatactcgtactggcacccaacgcaatatgactcacaatcgctgctttgataacttggtcaataatgaccagcgctaccattaaaattaaatagatccacatattctgtcctcacatttcgctaagctgtgtttaattataccaaaagacgtcgtccttgtacgaaactccggcaggaaaagcgcggtttttattgcagacttaataactaagcacctttcgagtattcccccaaaagcatcggcatctggttaaccaccccccagttgaagcaacgagcctgatgattggttgcaccgctcaactgctaagcgagttagtcatcatcggtagctcacaaattaaacgtgtgtgattgattcgctgtcgcagtcttccaaaaacagcgcaaataaaaagccgacccccactggcatcgacttatcggtcaagctttagaacaaacctgagatttttccatcatcactaatgtccatatcgagtgcggccggatgttttggcagtcctggcatcgtcaacacgttcccggtcaaagcgacaatgaaacccgcacctaacttcggcacaaattcacgaacattaattgtaaatccggttggtgctccgagacgtttgggatcatcgctcaatgagtattgcgtcttcgccatgcagactggcaaatgatcccacccttgcttagcaaacgttctcaattggcgctgagctttcgctgaatattcgacattggctccaccatacgtcttagtgacaatatcgttgattttcgtcttaagatccgcatccgctggtgataacggttgaaaatgacttggctgagcacataaatcaaccactgcggcagctaagtcggttgccccgtcacccccacgaccccagacatcagccaagactgcatcgactccaagatcggcacaatagtctttgacggcatggatttcggcgtcagtatcggccgtaaattcgttgatggccaccacgactggcaccccataacgttgcatggcatggatatgatgtcctaaattagccgcaccggctttcaaggccgccacattttcggttgccaaatcttgcaaagccacgccaccatgtaactttaaagcccgaatcgtcgccacgattaccacggcattgggcgcttgtccgaccgctggcacgttaatatccatgaatttctgaccacccaaatcagcaccgaagcccgcctcggttaccgtatagtcggctagattcaatccagcttgcgtggcaagtacactgttacaaccatgcgcgatattggcgaacggaccaccatgaactagtgctggggtatgcgccagggtttgaactaaatttggacgtaacgcgtctttcaaaagtaacgtgatcgcgccaccgacgttcaaatcagcaactgtcactggttgacggtcatgtgtgtagccaattacaattcgattaacacgttgtttcaagtccgcaatattttctgaaagacagagaatggccatcagttcactcgcgacggtaatgtcaaacccatcttcacgaggtacacccgacgttgcaccaccaaggccaatcaccgtatgccggagcgcccgatcattaatatccaacgcgcgcttccattgaattcgacgctgatcgatacccaactggttaccttgttgaatatggttgtcaattaaggccgcgagcgtgttgttcgcagccgtcagggcatgcatgtcgccggtgaagtgcaaattgatatcttccattggaatcacttgtgagtacccgccaccagtggcgccacccttcatccccataactggtcctaatgaaggttcccgcaatgcaatcatcgttgacttaccaatcttagtcaacgcgtcacctaacccaatagtcacggttgactttccctcaccagcaggcgtcgggttaatcgacgttactaaaataaggttgcgttgagttttcttaaccggtaacggtaatttgagtttagccttcgtgctcccatattggtcgatctggtcaaccgtcaagcccgctttagccgcaatcgccgtaatcggttctggtgtcacttgctgtgcaatttcaatatccttcatcaattctccgcccttctgtttttacttactccattataacaatcttcctgaaattatgaacattatttgtatattgattgtttttattcgtatctatcgactagttgctaggtcaatcaactgattgcgcgcctttttcaacatcaaaaaccgatattgattaccatcgatttgaactttcaacccaccgcgtatcgggacgatcaattcgagttgatcacggggaatcacaagccaagaatggttcaagaccgtgctaaaaataatgaggttatgattgattgttacgcgccgcaagctgatttgaatcgcgaccaaggcaataaagagcgccgcaatgacgagtaaccaccacttaaacttcaagatttctagccacaaaataatccccgccatcaatactagtgccgtccacgaccagacgatcacacttgacgctagcattggttggtatttaaaggtatgcttatcgttattcacagtacaaaattcctttcacattggagtgagtttgatgcaattatatacggatgccgcgaccacacccgataatcagcgcagtgccgcgggaatcttaattattgatcagggccaacaacaccaattcaaacaggtcttgccagacagtgataatcataccgcagaatttcttgccgccattgctggctttaaaactttattagattcttatggtccgcaagtcagcgtctttttctatacggatagtcaaatcgtcgccgaaagtgtcgccaagggttacagcaaaactttcagtgtcgagctggcgactttgctgcacctgcaagaccagtgccaattagtaatcacccagtggattgccgaaagtgataaccatggcgcccatcaattagcacaacaaggcttacatcttagtgactaatcagccggggccaaataagtttcaattggtcgttgatactggtcccagttatgagcaccagtttgaacataatcggctaacaacttaccaatcatgggtcctgttgttaaaccagatgaacctaacccgctagctaccaaaatatgtgggttatccggaattggaccgaagaacggcgcaaagtcacgcgtgtaggcacgcgtacccacttttacctgcgtaatttgatccttagtcaggttggcatcaagtttgagcccgctagcaaagagatcatcttcaaccagacttgaaacctgcaaatcgtagccctgatcattttcgtgcgtcgccccgacgaccaatttgctgcgcgtaaagggaataaagtctcgttcaccttcaggcatgagcactggaacatcgtcagcccaagtctcaggcagctgcatttcaatcaactgccctttttgtggccgaacatcagcaacaatcttcattggcaacaataacggctttagccacgccccgactgctaaaatcaacgtgtcatagctttgctgaccattaaccgtcaatagttggccctggtcacctaaacgtaccttacctttatgacggaccaggttccgcttttcagcgtatttcagtaaattatgtgcaaacttatcgccatcgacccgcgcaccaccactcacaaacacaccgggttggggcgccgttagcagtgggatccgttcttggacttcttcagcagttaatttctcaatcgttcccatctggggtgccgcttgccggcgctttagagctaaatcgtatagcgcctgcagatcatctggatcggcacgagtcacaatcgttcctgcttgttgataaacagaatagcccatttgcgtgtccgcaacaatttccggatacaaagcagccccggccttagcgagttgataccaacgctgattacgacgtttggataaccaaggtgaaataatccctgctgaattcttagtcgcttgaccaataccttcatcataaatcgtgacgttcaggtcagggttctggcttaaatagtacgccgtgaccgccccaacaatgccactaccaataatcgttacttgtttttgcattttccaacgcctccacaaccaatctgctttcattttagcatactcgaatttgttgcgggtggctgattcagttggattaaagtcagaccattggtagatgttgctggtactagctttgcagcgattaatttaataccgtggactggctctttgccccctatgactgggacagagcaatcaatagttgttgccggacaaaattttcgttcgtccagtgtaaataatgctgacctggtgcatgaactaggtgaccaagctggcaccacggtgattgttggtacgccgtcaagcgttggtcagtgactaaaacttggattggcagcgtcagtacccgcttttcagcggttcgaagcgtcgttactaattgtggtaagcattgcgcttcagtcagaatactcgggttcgcgtaagctgctaaatcaatacgggcattggcaacacgttctgccagtaggtttaaaggattaacttctgctaagagttgctgaagtgtcaaagtttgtcgctgttgtactagttgcggatagttttcaataaaagattggacgtttgcaagaagttgtggtgccatcgcggcatagggtggttcaagcaaaactaagccacaaacattatctaagtgctgctgggcatataagaatgcgtaactagcgcctaaactgtggcccaccaataataagttgctcacgtgttcatggtgaaccacatcctcaagattggctaaaatatgcaggacagtgcgcaccatttgactatgaatgctacggcccacgccaatcgtgtcgatggcaagtaatcccacctgacttggcaatcgtgccattaaatgcttaaaattataatcagtggcgtcccagccaaacgccggtaagcacatcaacgtcggctgttgtggtcccgccggtcggtactgatagtacacttgtcccaattccgtcattaattgattcatgattacttgcctcccacaatgacagacatcgtaagtagttccaaatgcttttttattacagataaaacacagctttacaatcagtcatgcatagtctagtccacaactgatcagtagaaaatggtttttaaccgcttcgttaaatcaactgaccattaaaaaagttacaagatttaaataatcgtcacattttgaccatattttcgttttacacttattaatatgcacgactatattgttttaaaggacttttgccatgttagttattgtttggattcttttagttttattgttaggactcatgggttggttggaataccacaatcttcagcatccggtcatccagccagctaaaaccctggcgccgcgcgcacagctccaattgcaacatcaagtgcggcaacacgtgaccgatcaagcaccacgattgaaatggttatattatggaatggcagcttgctggtggctcggtgttatcagtttactagtcagttgctacttggtcagcgcaaaattaaccctgttgatttttccgattcggagtgttgtcacaagcatcgccttaatgatcgttggcattatcttgctaatgattcccgccttagtgtggccgacgcaaagttatgattacttgattggtcactcaactcaagaccatcattggcagctagccgataccgccacgtttgaacactatcgtcgctttcagatttggttggttttggcattagacgtcttcatcctgattggttggattagttgggcctaccgggtcagcaccgttcccatggtcactattgagtacctactaatggtggtggcaatcgccgtaccagttgtggcattgatcacgctgttagcacaactgccatacttacatcaaaaccgatacttgattccggtcagcgggcgctttggcacccagcattatcatgcgaatcaggcactcatgcaacaacaaccggacttaaagtcacggctaattatcgttaatgttgttcggattattggttacgcgttggggttgtatgctttatggttgttatatgccaacattcttgcaccggcctttacggtcgataccagtatcgtttaccccgcagcggcgtttgccatcatcggattgttaatcgtgttaacagcgggcggtgtgtggcttccccgtttctatgattacttgcaattattagataacaagaccttgacgttcaaattggccggtagcgaccgcttccgtcgttttcgttttcatttgtattacttcaagttggcattcagtattttatggatcgttatctgggcattgatcatcggttatatttattactttggctaggtacgctcaccaataatacgcaaaacggtactcaaactaatctgagtaccgttttttagtgtcattttatgagacttgctagcgaggccaacttgagcgccaaaggactcaaaataagtgtcgccattgcggcgcaagagccattactgttatattactgcgttttgaagagcgcaacaaagtcagcttgcgcgctcgcagcttcaaacgttcgcttggacagtgtcgtcacctgccgatcattgagccacagcacttggtaatctgtaaaagcatgaaggtcgcgaacgtcatgtgtaatcatcaagtaggttcgctcaggatgggcttgcatgacctgaaacaacaactgcacgttttcccgatcgaccgctgctgttggttcatccaaaacaatcaattcgcgatcaacttgtaagaacagcaataactgaactaatttgcgttggcccccagaaagctgaccataatgctgatcccacaacggggccaagaattgataagcttgggtatcaataagttgttggagctgttcagttgtcaatcgtagtcgtccgtgctcgatgcccaaaaccagttgggcaacgtcccgcacacgaattgaagacagtaacgggagttgttggttcaaataaatggctgctttaggtaggtctaattcaccttgtgccggccgcaaaccagtgatgatatcagccagcgtcgtttttccagcgccattttgaccaatcaaaaaattgacaccgggactttttaattgaaaactcacgtccttgaagaacggttgcccatttcttgaaaagtaatatgctaagtgctcaacacgcatcattataagccctccgttggcagaatcttaatgtgccgatagctaaatccgccgataaccaataatacaatcagactcagaagataagtcgtcataaagtggctgacggggcccacgctgatcatcgcaaaaacattggtaactaagtaaatgggactaaccaggttgagtaatgggttattggcagacactgccagcatgttactcaacataaaggtacctacgacgacgatcagcgccagtgcatttccaatcatatcgacagttttacgtcggagtgccaaggcaatcaagggtaagccaaaacaagtgactggtagatacgtaagcaacacagtcaaccataagcgacctagcaacgataaaaaggccaacttgaaagtaatcgcgctcaacagggccaccaacaataaagtcatcaaaattatacccaagctgaccagcgcttgactgacaagaaaaactgcagggctaaccaccaaggttcgatattgtttgagataaccctgctcgcgaagaatggctacattgctggcagtcgttagacaattggaaaaaatcatccaaccaatgtagggcacgacttgagccgtataagttgtcagcgataaaggtttaaagaaagcgctactgacattcatgattaaaaagacaagtggcaaacagatcgtgtaaattaacaccccgggagtatcccgaatgaccttaaaaaaatactgcgtgtagacccccacttgaacactatatttgtgcatcaccatcacaccccttttgttaatctaattgttttattatatgtttatcatttatcaaaaagcaagtattcttataccaggcatgtaagtatggccaatttacaaagtttttgagcttgctaaacgtctttaattgcaaaaggtagtctaaaaatgactaaacgtcaccgttcgagcctgcgcatcaatccggacatccgcccccaatggcgtactgagcatggggactgtatggcagctatcgtagtcgtaaataattggtaattggcgatcccccagcacctcctgtaagatatcgattggcaaccgcccgctgccttgatcatcgtacaacgcgtgttttcccaaaataatgccagagatttgatcaaaaacaccagccaacgctaacattacgaaatttttttccagcgttgctgcagttttctcggcatcttcaataaataaaagctcgttaccagttaattttggaaaataaggtgagttaaagaagccgtacatggtgttcaagttcccaccgatcaaacggccagccaaaacgggggtcgccgtataatgccaagtatttgcgtgcatgtgtttcggatgttcaaaggtctcccaattgatcgcttcatccgtccactgtgccggtgccggttcggttacggcctgccccggtgctgcgcggtagactgtcagaaaattttgccaagtagttgtcacgatctctgactctaaggcgccaagtgaggctactaaggccggtccgtaaatcacacgacagttaggcgcgtgcgtttgcaccgccaataacacggccgtcgcatcggagtaaccaacaattgttttgggatgctgattgagatactcgtaatcgagcattgctagaaccgaatttgcgtttgtcccaccaatcgttgccatcaagatgtccagcgaatcatcatgaattaacgcgttgatttcggccgcccgttctttgatggaaccagcacggtaactatcccgtcgtcccgtcaaattaccggcaactaaggtcactccttgggttgccaagaaccgtcgtgcgcgagcataacggtttggcgataatgccgtaatcggcgttgatgcagaaaatgtcccaattttcattgtattcccaccccacaagattaaaatataattaaaataagtgtagcactttttaatcttaacgtacttccaatcgacgtatttcctcaaaaaaacgactttcagctaataacttgctgaaagtcgtttagtaatcaactggctatgctcgttttgagcgacttaattgacttattgtgtgaccacgtttgagcggttggctgaaacgtaattccctttattcgttaaataatagcgtgagccacccgaccgtgagtaaaccttcgttactttaattcgatcaccagcggcgtggtaagcgtgtcgattagacttaacaaagtttgaagatttataggtgtagagtcccactttagccttgatccagccactggaaggtactgattcatagtaccaatgatcagatttggagaccttcgccgtgatataaccaccactcaccttaattcgatagaaattcccacttttaaccaatttaccactgtagatgccaccctttttcaaggttttacccgtcgaggttgtcaaattaacatctttgaacaaagtgctcttttcacgaagttgatataatccgtgttggccgacccaatagccggtgacgtcctgtgataagacccatttattcagaccacttaagtaaaccagctgtttggaacgactcttagtgactgacttggttgctgtgaccttgtagtattttttcttagcgctactgggcacttttgtgccgtcataatagctcgacgccccattattgaggtacacatgttgccctttcgtataactgctgtaggcatacgtcgtgctagttgaactggtcgacgatgatgtcgaagtcccggaagtccaccagcttaacgggtggtatgtcgtcacggaagcactgtcatacaaactgttatcaacatattgtcctagcgaagataaataatagctactggaatattgccacaatgagaacgaaatcgtcggcttcgaggagtaatttgcaatccactgggcatcaaaactttgccgtgccgtgttggcgtatgtggttgcaaatgactggtacgaataaaaaatcaacttcttgctcgttaacgaccgcatctcagtataccaagccttgacagccgcgttggccgccgtgctactcatggaagtcgtttcaaaatccaagacgtagaacttcgtgttcttatttgcgcgttgatagaacttatctgcctcggctttggcagtcgcggtactcgtaaaggtcgcatagtcataggacccgaacggaacaccatatttcacatagagactctcattagaggtgtggtagagatcctcataactgctcccatattgcacccggttgatgacaaaatcagcctgactcttcaaactttgaacctcggtactcgttaactgaccttgccactctgagatatccggcaccgccgcgtgtgcctgaacgactccggtaccacctaaaaaacaacccacgagcagcagtatcaaccgccactttttctgcatgaccaaattactcgccttcccatcattagtttgatatgtacgtttactgcacaccttatcctaccgataaaatgtgcagataagttctcaaactgattgcagtcgctttacaatttgtttacattataaactaatgcaggaaagtgtgatttactagtaaaatgattcatgtggaaacttttctaatcgatataggccttcatcatccgggtagattcctccaggcttaggtcgatacccgaagtgttggtaaaataagtgcgcagtcacggacgctggaatttctacacggtgggcatgactgaaatagacatcctgttcaagggtatgcagaatttgacgcccaccacccatgccttgaacctccggatcaacaaaaatcgtgaacagactgtactcacctgggcgcccccagtatgacccaatcgccccggtcgcaacgagttgctgctgaaaataaccgacataaaagtgcgtcgcagcagctttttggcatagccaagccggtgtcatctgggtaatgagccgatccaagtatgctttgggatagtcaccctgattactcgtcagtaatgtgcgcgcaatcagtgccgccgctgctggcgcatccgtagttttaaaacgtcgaatttgtaattgcatatgacaactcctctcgtattgcactattctttgctcgttgcaatgaacaacgaatacctttttgatcgtctgccgataccaatttaacaataaccacttaagcttccacaaaccaaggttctaaaatttttaacgtagcttgctcaaaatcgatacacacttgcgccccatatggaagtgccgttcgcggaaaagcgtgaccaaaattaatattgtacagaattggcaatttcaaatcggctgtctcatcgatcaaaatttggcggtattcctgataataatgctcattctgcggcttacctacaatcacggcggctacgtttgtcaaaatctcagcttgtcgcattcgttgcagcatccgcttgaacaaatctggctgcggctgttcgtcactcgtttcgataaacagaatttttccgcgccattcggctgcacatggaatcagtctgaactgttccgcaacttgccgttcgtctggataacgggtcgtggtcaataaatcataaaagctgtccagacaaccaccaagtagcgtcccactgattgtcccgtgaccacgtaacacttcgtaatggtgcatttcggtgtgggtcatgcgccgtgttccctgcgccgattcactgaaatttgttcgttcgtcataccacacaggactgctaataatgcttgtctgctgaggattttcaaagtaacgctgccaagtcttcgtggtatacggcaacatcgtcggccctaattcggccaagtcgcttaagaaattggggccataaaaagtttgcagtccaagctgataaaacatcaaatgattgatcgtcgtatctgaaaagcctgtaaacagtttaggcgaccgccgaaccgccgtcttaaactgctcatcagccatcaaaaatggcacggttcgatacgtatcatcaccgccaattgccgccacaactccacggatacttgggtctaagaaagccgtcttcaaatcggcggctcttaattcagggcgttgctgtaaaatcagtcgccctttcaaagcattcggcatcatgactgggacgagccctagttggcgcatccgttttagcccccgattcaattgatgttgctgcgtgagttctccgagcgtgccgctcgaaagactgacgacagccacgtgatcaccaacgtgcaatggtgctggttttaacatattctcaccctttcctaatttaatttaaaattaattttatcatcattatataatattttaaattgttatttggtttttattcattttcaatgtaaccaacgactaaataggtcactgagtccgctgctctgcatgactcagtgacccgtcgccctattgtagccaatcttttatgtcaaccaagcgaatcttatgcgtacccgctgaccatcgttctggctgtgccttaaccattgtcagcaactctgttagtgactcggaaccaacaatcaactgttgcagtaattcagaaatcagtggggaacgtggttgcgcaccaactaataaacaatgttcaccttcaaaggctaacacgtcacctcccgcccgtaaacggccaaacgggcggtgcaacttgacggtacccaaaatcagcaagccaccttgttcaaataacgttttcaacaaccaataatcgagtttaaagtggttagaccgttgtcgtaaatcggccggcaatgctttagctaccggtataatcgttttgaaattccgactatactgatgccacgattgagcccagtcctcacgctcacagataaatcgccggggtaatgtcaattgacctgcataatcacaaacttttttaatagccggatcactcattattgacggactggcttcaaaaataggacgcaattgtcgtatcagttcaataaactccgctagataatcggcaaagcctggcgttgctaaattaatcaaaattcgcttagcgacgcaataagtcaccgcaagtcaccgcatcctgatacgtcaccttggcgtgctcaatggcatcttgataggctgtcataatatcaaacagtcgtgggttggtataatctaaagttgtcgaaccagcatgtttataataattataaaatggttgttgcacataggcgactcgctcacagtaactcaacatgtccagcaaaatatctaaatcctcgtagaccatccgctggtaacgatatttctgccaacacgaacgtgcatataatttatttccggaataagcattatttagaccgtatttaagataagtcgcaattgccacgtgctcagtcgcatctggcaagctcagcagactagttgtgcggtgagtcgccgcgtagattttacgaacatcacaaacgacgatttgggcatgactacgctcagccgttgctactaaggtcgcatacatcgtcggttcgacccaatcatcagcatcgacaaaacctaaatagcggccatgcgcggcggtaatccccgcattacgtgcaggtccctgtccttggttacgttgatggataacccgaaataggtgcggccagcgcgcacaatattggtcacaaattgtagccgtgccgtccgtactaccatcatcaacaataatgacttctaaggccgctaatgtctgtttttttaatgaggtcaaacaacgccttaaccagtgctcctcattatacgcagccacaataacagaaacttgaacttgcatactgattcccccaacactccaaatgatttcgcttacattatgacacacatgcttcgcatatcacagcacggatccatgatagggataatcatgcgcagtcgtggtctgatactctcgtaaatcgtcgatacgttctgctaaattaaaatgaactgctgaaagcccatcaaactgagtcatccggtcagtaacagcggtgaaggaccactgggcaaagatcatgttgtcagttgctgaccacaaccgctgaatcgaccacgccgttacccgttgaactcttaattgatgttcaatccaggcttgaacttccgctaatgatagatatgctggtccatagcattcttgataataacaatcgaccgcaaatattcttggtaacgcttcaaaatcacgagtgacccacatcgcaaaatattgctggacttttgcttttcggtcccgaagtagtgccgtttcgatttcggtcatttataacaccttccgttttaagattactttttagaggccgtaattctagttaataaacaggcgattaccattattttaacatcactaacaattaacaagaccaaatattgactaaacaagtctatcagttgtattcagcagtcatttctggcacagttaacttaatcataatattaataaagtgagccgataaatatgatcaaagttactaaccgacactttcaagatgtgcctgcgctggaagttgttactacaacccatttagaccaaccgctgccactagtgattttttaccacggttggcagtccaataaagaactcgtcttgacccaagcacgtaaactggctcgcaagaatttacgagtcgtcttgcccgatgccatgaatcacggtgaacgacaccaaatcgttagccagattccttcatttactttttggaacagtatccaaggtaatcttggcgaattcgagctaattgtgaattactaccgggagcgcaaactcattttgaatgagcagattggtgttggcggttactcaatgggtggcatgacgaccggggctttattgacccatcatcctgaaattaaagcagccacaatcattatggggacccctaacctgaacgcgtacgcccaactagtccgcaagcatgcgcaggcccatgcttattacattcccagtgatttagccctattgacgagttggctagatcactatgatcttaacctgcaaccggaaaccatcaatcatcggccacttttattttggcatggtactgaggatgaacggattccttattcacagtctcgtaatttctttgaccgcgtgcataccgccccgtatgctgaacaagtggcatttatcacgggttatcaagccaaacatctggtcaaagtgcctctgatgaacaaagttgctaatttcttcgattattatttaaattaattatcaaaggctcaaccatggttaacgttagccttaaaagagcgtgcttagtcggtcacccgattaaacacgctcttttaaggctactcaaactatctgtcacacattgtaatgatcgttattgtcagctacaagttctttgaatttcttatttgccaagcacaaccggcgcctatagctgaaatcaatgctgtactaaacatgactgtttgaaagccaattgcattcatcgcgggtacccgactacccactgtaaacaccaccacagcaattgccgtgccagccgcacctccaagtaaccgaaaaacgttgtaaattccggctgccttaccgataactgccggtgacactccccccaaaactgcatgctgtaacgcggggcccgccattgacaatcccatcccagcaattgccagcggagcaatcatcataacataagccgcatggttggcaactagataaccaagcatgaaatacccaaatgtttgagataatagcccgataactgccacaatcgcttccccgtagaggtccacagctttgccagcaaatggcgcaactaatactagtgtcccagtccaaggtaataaggacaatcctgcctcccacgcattatcatgctgaacaacttgtaagaattggggtaaaaagaaaacgactccgtacatcgcggcatataataaaaaagtcgccacatttcccatcgtaaaaatacgctttttaaaaagcgttaacggcattaacggtgcaacgacatgttgctgtcgcttgataaaccaagtgcctgcaactaagccaattatcaggccaacgaacggaccaattccattaatactagtcgaactggcagctaaggcccaaatgattgcggtcatcgctaacattgaaagacctgcgtccgttaaattaattggtgttgctaccccggtactttctggtaaatagaaccgggataatcctatgacaatcaggccaagtggcacattgatccaaaaaatccactgccaggttaatttagctacaattagaccacccagagccggcccgacaatcagtgccagtccaccgataccgctccagattcctaaagctttcccacgcttcgcaactggaactgcagccgttaaaatagccattgacatcggtgtcatgacggaggccccaatacctgcaatgacacgtgccactatcaataatggcattcgattggctaatgcacaaaacactgaacccagcgtaaaaactaaaatgccgagattataaacccggcggcgtccaaagcgatcacctaatgcaacgcccacaagtaacgttgctgcaatcgcgacattgtaagcgttgagggcccactgtaaactggcctccgagatgtcgaaatcaattttaattgctgttgacgccgttgtcacaatcattgagtccatcattgccataaaaaagcctaatgaagttaacgctaataaccagccaaactgtcgctgtcgattttccatgttttccgccccattatcatttattcagacttaccaatgctgaataagcctactcacaaagtttaaatctactatgtcaatctttttcttagatttagttgggtggccacctacaatagttcaaatatttttgaactattacagcgtaccatcccactaacgattcggcaacaaaaaaataccagttcaaaagaccaatcggcacttaagaactggtattagtcagaatcacagttgaagaccgcccaaaatactcagcaatttaaaggctttgataaaaatgggtaacatagtgatcaaaagttttggggttcaacatgacgtatttttcacgtgcaacttttttgacggttattaatcctgctttttccagcaatttaaaatgatatgaaccagcggttttactaatccccattgcttgtccgacttgcccacaagtaacggcctgatcctgcagcttcaaatacttaacaatgttcagtctaaccacgtcagccagcactttaaatactaatagctgctgggaatcaacttcagaccgcggtatttcatttgccaatatttttcacctacttttaccaacaaaggtcgcttgcttattccgtccgtgctggccgaattcgtttgccccaatattggaaataatctgtccgtaacgcaccgttatagagtttccggcgtttcgtggctttttgtccatagaagtcttcaaattctaagtcactggtcaagatatacttgctccaacttggcaatttactgtaaacttggcccatttgccgatagagaatccggacactatctcgatcgcttagccgctccccatatggtgggttcgcaattaggaccccgttgatcttgtcagtcgtaaagtctttgacagccagttgtttgaaatgaatgtcatgcaacagcccggcttcccgcgcattcagcttggcgatatcaatcattttaccgtcaatatcatacccactaatatccagctcagtgtcgtaatcggctaaactatcagcttcgtctctcaattgttgactcaggccagcgggaacccagtcccacttttcgcacgcaaatgcgcggttgaaccccggggcaatgttgcgcgccagtaaagcggcttcgattggaatcgtccccgaaccacaaactggatcaacaaatggattatccggataccacttagctagcatcactaaggcagcggccatgttttcttttaagggtgcgccccccttttcgactcggtaaccccgtttgaataaactagagccagttgtatccagcgttaacaacacgtgatccttattaatagccacttctaatgggaacaaagcgcctgtctccggaaggtgcccgctccgatgataagtatcggctaactgattaacgatcgcctttttgacgatagactgcacgtcgggaacactgtggagtttagagttgcgcgatttaccttcaactggaaattcagcgtccatcggcaataactggtcccatggcaatgcgagagtcttttcaaacaactcatcgaacgtataagcatcaaattcaccaacgatgatcttgattcgatcagccgttcgtaaccacaagttggtccgcaaaatatctttgatcgttccgttaaatcgaacccggccattttcagtttgaacttgataccctaaatctcgtaattcacgccccactaatgcttcaattccgctagcggcggtggcaattaatctaaattcttgcatagtttcctcctgcgacgcctgttctgtaggcgtatcttgttgagtaaatatttccactaaattggtttcctcacctagtttagcataagttgctagtttgctaactgatcgaataaaaaaactgggacaaaagcgaacttttgtcccagtctcctgtctaaatgtaaattcctgtaggccatgttttgtacctagttaaagtacagggtctgttaactaggcggtaatcatctatctcgagattactaatctccccccacatttagttcagttccttatgtgaagcgcccctaccgtagtttgggttgcccgctcgtggggtttaccgcgttccaactcaaccgtttccaattgagtatcgtcactgtggcacttttcaggaatactcgggcatagccgaagccttagccgttttttccgccgttaccgataaatcggtaccccggcttattttttcaccgagcacgaacactacaagcatcgcagcttgtgcgagcatggaccttcctcagccgacataagccgaccgcgattacccagaatttacatcgaatcacaattatagacggtgtgattcattttgattattatctaattgggcaccaaagacatgacgttccaagttagacaaacgtttcagaatatccatattcgtcaccgtactagtcggttgagaagatggactggttgcaccgacagcgacttgcttggtaagctcgtcaaccttggcccgtaaccgttcattttcatctgaaagttgttggttatctttagtaaatgactcatagtccttaatgacattatctaagaagccgtccacgtcggcaggatcataaccccgcatctttggcttaaactctttttgaaggatgtctttgggagtaaaattacgtttagccatatttaaaaacacctcattgttattcgcgcgatacccattcggcatccgcattacttaaaacattgtagcagactttattcaaaattaaaaccattattctgtttttctgcatattcattggcactttcctgtaaccagtcgaagtcgatcagggtcaatgggtacggatgagtgtcactaaagttccgaatcaaatcatagtcatacgtgggtttcccggggttatctggatcatataccagagtggccgcatccgtatgggtaaccataaattcttggtaattttttaattgttgcggattttcatacggttgtttactgactggtgcatgaaaatcgacttgggccagcaaagtctgtaatttagcttggttattttcattccagcgcccaccaaattcaccatatggtaacatcattgccactttcaattctggatatgtctttttgagcgttaaccctacttccgctgtccactgttcaataccgagctgaccacccgttatcagccaatccataccatcctcgatctgcgtcgttaagtaattagttaacgcaaacttaataacttttagtttatcatcctgatcaccaaagacattcaactcgtaactccggtaaccactaagccacaaccggctcataaaaaagtctcctttctgtcactaaatcggtctaaatcagttaaaaactcacagatatttcacattccctattagttaatggtaaaatgtaacattattaggaggttgattaatgtgacgattcgctatccaaacggtcaagtttatcgccaacccggcccaactaaatcgaaatcttccaaatttgccaacgtcaattttggcgatcgtggaatgagcttggaacaagaaatcaatgatagtaacgcctattatcttgaaaataatatcgcagttattcataaaaagccaacgcccattcaaatcgttaaagtcgattatcccaaacgcagcgccgctgtaatccgcgaagcttattttaaacaggcttctactactgattataacggtgtctatcgggggaagtatttagattttgaggccaaggagaccaagaacaaaacggcttttccgctaaaaaactttcatgagcatcaaattaagcacatgcgccagtgcttagctcaaagcggaatctgttttgttatcattcggtttgcgagtttggggcgcctatttttgttaacagccagcgacttatttacttattgggatcatcaaggagatggtggtcgcaagtcaattccactgacggatattgaacatttagccgcggagctacattatcaaatcaatccacgcattccctatttggatgcgcttgatcatattattgatgagacctcatcaattcattaaaggagaacatcatggcaggtaacaatgaacagaactcacgggttgctcgcagaaaaagccaacctaaaccacctaagaaacactggtttcggcggattattttatccttagctgcactgtttgtcatcggggtactcgctggtctagcacttttcttctactatgcgcagacggcaccaacagtcaaacagagtgaccttgtcaatacggggaccgctaagatttatgaccagaacgacaagtatttgacctctttgggaactaacgaccacgaatacgttaagtctagtaatatcccatccacacttaagaatgccgtcgtctcaatcgaagatcgccgtttttacaagcataagggggtcgattattaccggattcttggggctgcagtcggcaacttaaaaggtagctcacttgggatgcaaggtgggagtaccttgaccatgcaactcgttaaacttgcggtcttttccaccagtacttcggatcgaaatttgaaagtcaaagcgcaggaagcctggattgcgcttaatcttgaaaaacattacagtaaatctcagattctggaattttacatcaataaggtctatatgggtaacgggatttatggtatggggactgccgccaagtattattacggtaagtcattaaaagatctgagccttagtcaactcgcactgctcgcaggtatgccgcaatcaccaacctactacgacccgacgacttatccatcatacgcaactagccgccgtaatctggtgctggaagcgatgtacgataacaaggtcatctccaagagtcaggaaactgctgctgaaaaagtcagtgtcaagacgggcttaactagttcgggacgttcaagcctagcgaagcatgaaaagacaaataaaatcttggatgcttacctgaacgaagtccgtcaagacctcctcaaaaaaggttataatttaaccgatggcgagaaagtttatacgaacattgacatggatgcccagaaacggctttatgacattgccaacacgtctcaatacgtcaactatcctaataatggaaaacagactttccaattaggggtatcggttgttgactcatacactggcaaggtctcagctatgattggtggtcggaaaaccggtaatgtcacgtacggaaccaaccgagctgtctggacatcacgctcaaacgcttcgacgatgaaaccgattctcgattatggaccagccattgaatatttgaattggccaacttacaagtcgttgtctgatacgaaatacaaatatcccgggactaacatttccgtgcatgactttgacaataattacttgggcaatatgacgatgcgtgaagcactggttcaatcacggaacatcccagcaattcgggccttacaagccgttggtaaaagccgagccaaaacctttgccaataaccttgggatgaacctcaaaaccgttaactatgccaacgggatcggtgctggtgtttccaccttacaagttgccggtgcctacgctgcgttcgccaacggtggtgtttatcataagccatactacatccgtaaagtgactacttctgatggcgttacgacatcgtatactagcactggtaagcgcgccatgaagaaatcaacggcatacatgattactgatatgctgaaaggggtcatcaatagttctactgggacggcgacaaccgctaagatcagcggcgtttaccaagctggtaagactggtactgacaactatgcttctcagtataaaaacaaagtaccatccgatgccgtcgttgactcatggatggccggttacacgaagaattattcggtcgccgtttggactggctatgataagtccaccgaagctggtggttatctagatacctccaacgaaaagatttcacaacaaatttatcgcgccatgatgaattaccttcaacagtattcaccaaactctgattggaccaaaccaagctcagttggcacgactaagaagaacggtatcgaagaactttacgttgttggtcacctcttctccagtagtgaagcctcgtcaggaaccgctagttcagctagctctagttcaacaacaacgggtagttcaagcaccagcacagaagcaagtagtcgtagttcggaaagtagcagtagtagttccgaagctgcttcttcctcaagtagcgccgaaagttcatcttctgaatctagttcagaaagtagcagtagttcggaagccagttcaagctccgaagcaagttccgaagcgacttcatcggaaacaccgaccgctgataccaataacacgactgaaggacaataagaatcacccaagaccactgaattcgattcagtggtctttttttatgtgcactgttttaccgaaataacacacaaagtttacataaactaaactcaaaatcaacgttaacacggcgaattaccactacaatacaaagtaacttaataaactgagcaaaccaattaagacaaaggagttgcatatcgtggttgccattaagctacacgaattatccaaaagttttcaaggtccggtaatcaatcaactcagtctgacgattcctgatcaacaaatcacggcattaattggcccgtccggttccggcaaatcaacgctcttaaacatgattgcgggtctcacgacacctgacagtggtcaaatttcatttgataatcagcccatttttgacgccgcgactcattggaatcagccccctgcccagcggcacttggcgatggtttttcaagactttgccctgtggccgcacatgacggtccaagaaaatgtcgctttcgctttagaaaagcatctgaccaagccggaattgactgctcaagtcaactgggccctcgaacaagttagtctgattgacttccgacatcgttatccacgtgaactttctggcgggcaacagcaacgggtcgcccttgcacgggcactagcgacccaaccggatttgattttattcgacgaagctttaagtgcgcttgaccccgaactgcgcacacggcttcaattagaaattcgcgccctgattcacgaccagcatctgacggccatctttgtaactcacgaccgtccagaagccttgcaagttgccgaccacctcgtattactgcaagggggcaacgtggtgcagacgggcacaccagcacagctgtaccaacagccaaaatctcaatttgtcgccaattttatgggcacccttaatcagatcaacgcgcaccaggccattcgcccggaatatgtcgcagtcagtcaaacgggtactcagcagcccacttaccaaggcttggtgcagcgttcaacctttatgggcgatcattttgatacttacgttcaagtcggcgcctatgattggcacgtcaagacccagctaccctataccactgcaccgatcacattaagcatcgatccacatcaaatactaactttttaggagttgactcacatgtctaaagcagcaattatcacattatccacgctcggcgtgctcgcaattggcacgtcgctttatgttaatcaacatcagaaaaaaacgttaaccgccaatgcgcaaaccagtcaacaagtcttaacagtatacgctgctggacctaaacccctttctgatcaaatcatccacggttttgaagccaaaactggcattaaagtcaaaagttttgacggcacgaccgggaaaattttaagtaaggtcaagaccgagcaaggcaatccccaagctgatgtgctgattttagcttcaatggccgctggcgtcgatttacaaaagaatggccagctattaacctatcagccttctcaagctaaacacctgaataaacaatttaaagatactagccaccagttgatcaattacagtgcttcggcagtcggcatcacctacaatacgcagcacatcaaatcggcaccgacagactggtctgacttgacaaccactccgtatcgcaatcaagtgaccattccggacccccaaacctctggttctagcttggacttcattaacgcttatcaaatgaaacacggtacgcaactacttaaagcccttcaagaaaacggtgccgatatcgggggtgctaacaaggaagtactcgatgcagtcatcactggccaaaaaatcgccgtctttggtggggtcgattacatgagtctaacagctattaaaaaaggcgaaaaaattggtttcgtttatcctaagagtgggactttggtcaatccacgaccggcgatgattttgaaggctagtcgtcatcaagccgctgccaaacaatttattgactatctcttatcagctaaagttcaaagacaaattcaaaaaagtaacttaattccgggtaccacgagcactttgaccgatccacgcaatggcgaagccatcaaagcctacacggtcaattggaccagtgccaacgcggccctgactaaaaacgttgtcgcattcaatcaggtctttagccaatgagtaatcatcaaatccgcttgtccttatcaatcatcaccagttgcttgttggcaactctgattatcggcccgttagtcgccctgattggtcaaacactagtcgggcaatcgccaagccagctatggtcacaactgacgcagccaaccaaccgtgtgagcattcaacacagtctgttcctcagtgggggcacggtcgtcgggacaaccctgctagccacccctttggcatggatcatgacgcacacccgtttaacaaagctcgcctggttgcattggctcttgttagtgccattcatgacaccaccatatattaacgcgatgggctggttatatttctttcaaccacacggattactggctcagcttaatccgagttggcaccaccaatttcagtggctattttcaccgttcgggatggtcattatcatgagtctgcatttgtatcccgtggcatacttaggcttacgcgcagccctcatgcaattcaaccagcgctggcttcaagcggccgaagttcatggggtcaacacctggcaacgactagtgcgaatcacattaccaatcatgttagtcccatacttagctgtatggattttagtctttaccaaaaccttggctgaatttggaacgccagccacctttggtcggagcatccacttcgaagttctgacgactacgattcaaaaggacctcaaccagtggcccttagatttccaaaacggggtactcaccggcaccctcctactgaccattgccctgattgcctggggtatccagcaatggttgttacgccggccagctgttaagttcaccggacaacggtcagcgtcacaatatcggcagcttggagtgacaacattagcaggcactttcgtcaccctagtcatcagtattgctattgtcctgccattcagtgccatcgtgctccaatcgctactcaaacaacgcagtcttggttggagtccgtctaatttgacacttgtacactatatagacctcttacgctttgatagtcctgcctggcaggccattgttacgaccgtcggattggcattactgattagcagtctcaatgtgatcgttggtttattcttgagcgttgggagtttaacaaaacgttttcccaagtggctgcgacagttatgtcataccttgggcgcattgccactcgcaattccaaacgtcgtcttagcattgagcttaatgatgctcttttcacaggtgctggcgttcaccaaattatacggcaccctaaccatcctcctgatcgcggatgtcaccttatttctaccaacaacggtgcaatacttgacgaccgccctcaaggcctttgactcggaattgctggctagcgcacgcatcttcgaacctagtttcggccgcattatcctaaaaattgcacttccgattctatggcccgcgctactcaacagctttgtgatggctttcattgccacgagtcgtgaattagtcgttgccctattgttactgccttccggtatgacgaccgtttcaacatttatctatcaatcgttcgaacaagatgaagcggccgccggtatggccctagcggtattaacggtagcactgacattcattggactgattgcagctaatcacctgcaatcagctactaagccagtacgccagccaaacggcatcagttggcactcaaatcggtaatcgtcagtagcggaaaacgactttgttttttcgtcatcgcctatcccaaactaaaaaggctggtcgcacgagcgtcaatgttgacgtcgtgtgaccagcttcaatcatcactgacaagttatttagaatcatcggccgaaacatcaccggtttgttcaacctcttcagcttcatcattcggcatgttaacaacggtgacgttagcctccgtattacgaacaacatacgctgtcgttgaacctaagaacaggcgagaaatcgcattagtcccagagcgaccaatcacgatcaaatcaatattttgagccttgggaacatcgaccgcaattgtcactttgggtaccccagtttgccgaattgtttcggcgtgcaactgatgggctgcaacttgatcctgggcccgctccaacagtttcttactctgggcttgatcaaaactcatcatatctggcgccgcactcgtaaaaacatctggactgtagacgccaaatcgattaacatcgatgacattcaataaaaataactgggagtcaaaaaccttcgctaaggcaatcgcatgttcaagtgcataataagcattatcggaaccatctaatgggactaggattcgtttatacatggttgagacctcctgataagttcaatgagttacaacatttattatcataatcataacttatctataatcatccagcacccaatatgcttattaattgtcaaaataagatagcggtttattgatgttaatcttagtaccgtaatatttttgcttgatatacttttgaatatccgcccgatggtaaagtttaactagtttaagataactagcacgatgctcgttcttagcggccgttgctaagatattaacattatccctagtactcttattcagactttcgtggaaaatcgaatcccgtaaaacgtgtaaatgtccttccaaagcaaccgtattcgaaatcaaaactgcatcgacacttttaatgatccggggaccagtagtatcatcgatctgtttgaatttcagatgacggggattgcttgtaatatccttcactgaacctaagacaccaaaattagctgccagtttgatcaggcccgctttttggagcagtaacaagcctcgcgaagcttgtgagggattgtcagcaattgcaatcgtagcgccatccggaatttcatcaacgctttgatattttttggagtagattcccattggttccaaataagtcgttcctaacgccgccaacttggccttgggattctgctgattataagtttggtaatatgaccaggactgaaaggcgttcacatcaacgttaccgtccaccgtggccttgttcagctgaacaccatccgtgatttgtttaaccttaatcgttaagcccatctttttggcatcttggcttttagcaatgtgctgccagacttcatagtccgatcccattgatccgaccgtaatcgtggcactctgttgtgtacgggccgaataactcgttatttcatgtaatcccacacaaataccaacaattgcagcaataccaatcaaccaccatgctaatcgtttcatcggctaattccccctttattaatgatgtgtgacgctcttaacgagccaatcaccaaacagctgtacagcaaagactaagatcaaaatgatgatcattgcgacaaacgtcacgtcgttttcaaagcgagcgtaaccaatactgattgcaatatcacccaagccgcccgcaccgatcgcaccagccatcgtcgtcagaccaatcaggctaatcaccgtcacgattgagacgcgaatcaaatcaggtagtccctctttcaaataaacccgaaaaataattgcaatgggactagatcccatggactgagcagcctcaacgattccttggtcaacatcgagtaacgcattttgcacttgccgggcataaaaaggaaaaataccaaaaactagtgggactaacgatgccgtggtccccaccgttgttccgattaaatagctggtcaacggcgaaattacggccaacagaataataaatggcaccgaacggagtaagttggttagcttgtctaacacttgatacgaggggccatcagctaaaatgccatggggctgtgtcaccactaacagtacccctaaacccaaccccagtattcctgcaaccagcgcggaaactgcggtcatatagagggtctctaacgttgcttgaataaattcagctttcatttgtaagacattcggaattaatgctgtcattagtccaccattcccttcacaacttcttcattgataatgcgagtgtggacaccttgagccgacatattagtgaccgccacattgaaggccgttaaatcccccgtaataatcgcaatcatgtcaccaacattttgaccatcgatctggtcgatattggcaaacaaaatgttaacgtcgacccccagcgtctgcgataactgcgagacaattccctgctttgttgattgaccaaagaatttgaacgcaatcagctcttggtccgctgctaattcactcaatttaatcgttttcgtgattcgctgaatggcggcccgaacattggtagatgtttccacaaaatcaacggtcagaggtgctttgggggctgtaaaaacctcagcaacggggccccgctcaataatccgcccatcagccataacggcgacatgatgacaaatactcttgatgacttgcatttcatgcgtaatgaggacaatggtaatccctagctcgcgattgacccgttgtagcaactcaagaattgccgccgtggtctttggatcaagcgcactagttgcttcatcagaaatcaagatttgcgggtcagtgactagtgcccgtgcgattgccacccgttgtttctgcccaccagataatttatctgggtaggtctgcgcatagtccgttaacccaacgagcttcagtagccgtaatgctttggcgcgtcggtcctgtttactaattttttgacccaataatggataaataacgtttcccaacacggtccgtgattgcatcaagttgaagtgttgaaaaatcatcccaacgtgtttcctggcttgacgtaatgcagctggcgatagcgtttgtaaggcctggccattgacgactacctggcccgttgtcggtgactgtaataaattgatcacccgtaccaaggtacttttgccagcgccggaatatccaataatgccataaatatcacccgtctggatctgtagattgacatcttgaaccgcgtgaacgacttggtgcccgtcgtcaaaagtcactgcgatgtcttttaaatcaatgattgcctctgtcatagtctgcttcctcccattaaaaaacgcccatcgtctctaatctgattatcagattaaggacgaatggacgtttttccgtgttaccaccttacttcaaatgaccctcacaggccaccgcacttcaagtaccgccactgaaaattcttagcgagactctaaccgcataacgggcgtagccgtcaacgcttaaccccgtcagctcagcgttgaaacttgcattataagaccatcttcaacgttgcgaaatggctacctcgcaccaaccggcagttctctaaggcattccaacaacggctactcatcttagacgtatttattaatatatttacttggttgtttacagtattgcgctattttaatgagaagtcaacatttaattataaccattttttaatttatagtggtgcccactgattttggtccaatgatgtgcatcccaccggcttaccaggacaggaaatcctggtggtcctgttttaacctcagtacgctgcgccaatgacgtgggcaaacgccattgatatgaaacaacgactaacccatcccgaaacaaagtggtagcgacgcctcgcacaggcaatcgccaccactttatttaaaatcagttttccccgataagcttttcagcacagtgtttaagactggtcttcacctaatttgaataacggaatcttcggaccagcatttgcgcccgtctggtgttgtggttgcggagcggaattcaagcgttgctcaatactgcgttggcgctctgcttccacctgggcagccgtttttaagttacgcttctgccagttcaacagaatccggtccatatacgtcaagttatagacttgacgcagaactgcttcccgcaatgccaattcgataacttccggttcataatggtcttcgtcgaaccacttactaatactttccatttcgatcggtgataagtcacggccaaattccgtctgaattgcccgaaaaaccttttgccgactgttttcactcgtggcttgttccgaagcttgagtgctaactggctgctttttgagcgcaactgctaacttatcatacaggccgtcaaaattataacggtcatgaattttttggtcatcagccgtgatcgattcaatcgtcagcaattttttggctaacatttcatgtagccgctgaaaaacggcatttgtcgattcacctaaactcttggcaattaccgcagcatctgggaattgattaccctgatcaattaaccgtttgaactgcaaataaaccaataattcatcgtttgtgaccccaatttcacgatagtgggccaataatgcgttcgcaatggtcgtttgaccatcattcactaacgcggcagctaaggactccatctcgttatcatcctttcactattaagagcgtgagactaggtcccacgctcttaataaaaataaccttcaattaaagtttacgggtaaatccggttcaacaaccgtgggaacggaattgtctcccgcacgtgatcttcggccgtaatccaagtcaagaatcgctcgagtcccaaaccaaaaccagcatgaggaacactaccatacttacgtaaatctaagtaccaagcatagtcgtctggatttaagccggcttgtttgatctggtcaagtaagtaattgtaatcagttgctcgttctgacccgccaataatctcaccatagccttctggggctaataaatccgcacaaatcaccacgtcgtcccgggttggatgcggcttcatataaaatggcttgatggctttcgggtaattcaaaacgaagacgggttgatcgaagtgatcagccaagaaggtttcttctggtgaaccaaaatcaacaccccaatccacgtcaaagtcattttctttcaacaattcaatggcttcatcgtaactgattcgtggataaggtaacttggtgtacttcttcaacgtttcaacatcacgacctaaaatgtcgagtgcgtattgacaatgatcaatcacaccttgaacaagaaaggcaatataacgttcttgaacttccaaactttgttcttgatgcatgaaagccatttctggttcaatcatccagaactcaattaaatgccgccgagtcttggacttttcagcccggaatgttgggccaaaagtaaagacctttccgtaggccaaagctccggcttcggcgtataactgaccactctgtgataagtaggcatcccgatcaaaatattcagtatggaacaattcagttgtcccttcaggtgcactcccagtcaaaattggtgagtccatcttaatgaaaccttcttgattaaaaaattcatacgttccgcgaatgacttcattacgaatgttcatgattgcccatggccgcttagaacgtaaccatagatgccggtgatctagtaagaagtccaccccatgttccttaggcgtaattgggtattcttcactttcaccaacgactacaatgtcttcaacttcgatttcataaccgaactttgaacgactgtcttcatgaatcacacccgtaatccacatactggcttcttgcttaacttccttagcgagttcaaaaacttcttcgctaacttggctcttaacaacgacaccttggaaaaaggcggagccatcacgtaattgtaggaaggcaatcttaccacttgaacgtttattagtgagccaagccccaatctttactttttcgtcgacatggtccttagcatcgataatgttgatctgttgcaccatttacttacatcctccaattactttgcttgttcagcaattttttctgtcataaatttttgtaaccgtcgatgggcctctcgcaaggaatcgatatcagttgcatagcttaaccgtaaacaaccgggcatgccaaacgcctctccaggcactaaaccgacatgggcttctaataacactgccgtcacaaaggccggtgcatctgcatagcctgttaaacgcaatgcttccgtaatatctgggaacaagtaaaaggctcccgctggtttgccagcaggcatcttaaacccaggtaaacgctcgatcagtgggtatagttcgtttaaccgcgcttcaaagccctgacgcatcgtttcaacagatgattggtcaccactaaaagcttcaatcgcagcatattgtgatacggcggctgggttgctagcagcgtgacctaacacgacccccatcttagccatgatggtttgtggcccggcagcatatccgatacgccaaccagtcatggaataggcttttgaaaccccattgatcaaaaccacgtgatccatattagcatcatctaattctaacacggatgtaaattcattaccgttatataataacttttcataaatttcatccgcaattaccaaaacgtcgtgttcaacggcccaattcacgatcgccgtcaattctgcacggctgaaaaccagaccggatggattctgtggcgaattcaagactaaggccttcgtcttaggcgtccgctgcgcttccaaatcagcagtggtaaaccgcaactgttcatcggtgctaacttcgactggcacaccaccagctaatttaacttgctccgaatagctgacccagtatgggactggtaataacacttcatcgtcgggattcagaataacttggaataacgtaaacaacgccatttttgcgccatccgttacgacgatctgattaggatcaaaatggtagtgatggtcagcctcaattcgctgactgatggcttgttttaaagctggtaatccagttgccggtgtgtagaaactcgcttgaccattttgaatactatcaatggctgcttgcttaatgttatccggggtctgaaaatccggttcaccgattcctaaattgataacgtcaacgccgtccgccatcatttgcttggcagtcgcactgatcttcaatgtcgctgacggttgaacctgcattactttacgcgataattccatgtacatccgcactcctttaaccttaaatgttaataattgatttcagctggtttccattagaatactgcaaaatttcataacataaattctttttctggttcaagtacgtaatttcccacacgaccgtcccatcatacttcccaagcgtcgctttgataaccttgctaggattgcgtttagaccagacctttttcaaggctttcgtacgtgaaatcccagcggactgtttgataacggtcgttttatgatgtttattcgcgttaattaacgcgtataccggaacatttttactcgacgttcccgtaacgacgtaataactactggtgccattgtactgtgaaaaggccgtcgtggtctttagcttgcccttgctgacggccagactatacgccgtcttctgggcttggtgcattggccgttgtgcggcccataacgtgccatagaccgccacgataatagctaaaatgacgaccagaataatcataatgagtcgctcagggcgccttctacgttgaactcgcatatgctcttcctttcaaaaacagataaattaattatagcaaatttaactgattgcggaatggtttcttacttagttttgaaaaaactttgaagttcctgcgtaatcatcgtcaatgaaccggttgcgggcggcaacgttttcggtaaagctttaagaatcgtctgcccgtatcgtttcgtcatcaaacggtcatcgagaatcaccgctgcccctcggtcttcatccgtccgaatcaaccggccgattccctgacgtaacttcaatgccgctttcggtaacgcttcgttatagaacggattgagttgtgcttgccttagttgttgataacgggccttggttgtcgtctggtcgggcgattcaaacggtaattgcgtgacgatcaacaattccaactgttcttgtggcaagtcgatcccctcccagaaactaccggcacccaggagaatggcatcgtccccctgcataaagcgccgaagcagcttttcacgactaccattgacgccttgagccaaaatttcgcgatcaccaggtagatccgtttgatgcaaactgtaaaagactgcttcaatcatattcagtgaattgaacaagaccaacgtttgcttaggcgctgccatcacgatgtcgtgaatcgcatgcgtcaagtatgccacgcgctgcttgccactgggtgcttccgccgcagtagcatccgtagcgacgaatagccgtgcctggtgttctaaatcaaacggtgttgataatcggtgatgcttagccgttgcttggtcaatatccaattgcgaataaacgtactgagatttcccagtggcaaatagcgtggcaccagttaatagtggcgcactgaagtaaggatatagttgcgtcttaaaatacccttgcgtatcgatcaagctacccgcgagcgtgaggctgccgcgatcatgccattgattaaggctcacccagaagacccgttgttcccgcgaagctggcactaaccacgtttgtaataactcatagccctgacggagatgttgaagacgattgtcaaagtcgtcgaggacgtgttgttcactaggcaagatttgcgattgatcatgttgatactgctcatttaattgttgaaactgtaaaaaacagttttcgatggccgtttgtaattgtttgatcagcggattgtgggccgcaaagaaatcagtcaactgatccgtggtgattcctaattcagcaggctgattgccgcccttttgtgctggtacaaacgttctagctagcgccgcctgcagttgttgcaggtgtaggtcagtatcattcaatgaattatctaataatttcagacgataatcggcctgtggttgttccgcgaacagtgcccgtaaatttagactatgttccgtgtcaatgcgactgatcaagctgtggcaggtcgccatgtagccattgaaatcaaaggtctgccgtgagtcacgaacgacaccatctgccagatgctgggcctcatcaagaaccagcagtggccgctcttgacggctacccaattgggccacgtggcgcatcaggtaggcatgattggtaatgataaaagtcgcttgcgcggtcaattgatcccgaaagcgtaagaaatcttctttaaaaaacgggtcatcagctttcaacgaggccacgccatgatgggcgatttcgctaaagtacggcgcttgatacgtgctcaagtgcaattcatccagatcaccagtcgttgtcatcgtcaaccacactagcacgcgcaacttcaataattgcgtttgcttcgaatgttcatgcaacgccaagccacgggcaaaccggtttaaatcaacgtaatgctgattacccttaatcacaaccgccgtcacaggattaggcaacaactgattcaacaacgccacgccctgatcacgtaactgcgtctgtaagaccgtcgtcgccgtgctaacgaccacctgttgaccatcctgtgccaagtaggcaagtggcagcaaatacccgagtgttttacccgttccggtcggtgcttcaatcaacaatggtacttgttcagcagactgttttgagtagtgccgataaatctggttcatcatccgggcctgttgtggccgataagtcaagcgatcaccaaagatatgctgcttttgtgcttttgtcaacggatagcgtgccgctttacgacccgcggcttgctgtggcaatcgctgtttacgcagagcgagcccgtttttgatcactaagtcagttggtaactgctgtggatgttgtttgccctgttgaaaggcgtatgcaaacaagtcagccgtttcacgtggtaactccggtgctaattgcaccatttgttgtaacgtgatcaatggtaagtgtgcgagccgctgttgtaacgtgataaacaaatgggccgtagcaattgcatcactatccgcagaatgcggatgattatggtcaatcgcaagcaagtgactcaagtcccgcaaccgaaaactcgaagcagtcggtaacagaatttggctaagagacacagtgtcaacggcctgaattggtagttctggataaccgacacgctgcaattctgaattgataaatggcaggtcaaagttcacgttgtgggcgacaaaaacagtcccttgtaataagctgtataccgtaccagccagatcatcaaagggtggtgctttgcgcacccgtgcattgctgatccccgttaaattctcgataacggccggaaccgttgttaacggattaacgtccgtggcaaatgtattaattattttattattcttaacaaacgcgcaaccgatttgaataatccggtcgccgtccttcacactagttccagtagtttcaatatcaactaccgcataagttgtgtttggtttcatggtcatttccccaagttatggattgtaaagatgttcattagattggttaccgcttgaatccgtcatcaacactaacgctgatgttcgaccaactaatcgatctttatggcatatcacgtgcgatgtgtttgtaatcagactgaaggctggtccaagtagcgctacacttggtctcgaccactaactttaacggttcgtcggtcagcccaacttagctgagttcaacctactaaactgtgccagtgacacaagtcgtcctgatgacgcaagccgcttggctcatcctccacaccgatcgtcacacatacgtcacgtcgatcattgtaaattatagcatattcggcgtagggaactcagcccgaccaactcttaagccaaattcgtcagtctgaggacaacgggcagagactggtcaagagtatgattgagcaacgataaagttcatgaaagtgtctcggcgtacatctgccataacacagtcagctgagtacgcgcgcttgaatagccggcactgctacccaaaatttactttcctaattagtgaattctgggccacgtagtccgtcacaagcagctcaacttctttttcatcattatcggactgatttctaatcatttactaattttaacatagtaatcgatcttcgtctgccgttgataaccagtctgtccatacgcccctcacgtgaatgatttaatttaattaaattgttactttccaaaccagtttaacttacatttcaactgaattcagcgcgttcgccggggttagcatggcaaaagaagtgctaataaggtattatgaagctattattaatctacttacagaaaggcagcgacacgattgaaagatctagctaccggtactagtcatgccaaaattattttaattggcgagcatggtgtggtttacggacaacccgccattgccttaccgatttcgaccatccaaatgcaggccattattcaccgccgtgatgcagcgcagacggtcaaaagccgttacttcaacggcgactttaagatgatgtctgccaacttaggcggtattcagacgctcattagaaccttgcttgcacgttttgatgcccccgagcagggcttcgatattcacatcacgagcgatattccctctgaacgcggaatggggtcctcagccgcagcggccgtggccgtaacgcgggctttttatgatttcttcgaccgaccactctcccaccaagaattattggccactgccaatgtggcggaaagttacacgcatggtcaacccagcggcctagacgttgcgacggccagtgccaaaagtcccgtctggtttgtcaagggtcgtgagaactttccgattccggtaaagcttcccggctatttagtcatcgcggacacgggtattaaaagtcagaccaaagttgcagtggcgaccgttcgcaacttactaatggttgagggcgcgacgattcaagcacgcattgatgacttgggccgattgactcgtcagacccgaaccgcgcttgaagatggtgacatgggggccctggcaacagccctgaatggtgcgcaagatgacttacgttccatgggtgtcagtcatcctgcccttgaacaactactcgcagtggctcgccaaaatggtgcactcgctgccaaattaaccggtagtggtcagggcggttgcttgatcgcgctcgctccggaagccagcatcgccaaccaattatcacaaaaattggccgcagccggtgcgactgcgacttgggtcgaaccacttttgtgcgatgactaattttaattttggaggaaaagacatagtgaaaaccgttacggcaaaggcccatactaacattgcgttagttaaatattgggggaaaaaagatgcggcgctgatgctaccacaaaatgggagtatttcgctgacccttgatcacttctatacccagaccagtgtgaccttcgatgagcatctcgatactgaccaaatttactttaaccatcaacacttacccacgggcaaatcagcacgaatcagccagttcctcgaccttattcgccagcgcagtggtcaaaccaactatgcaacggtcaaaactgaaaatcatgtgccgacctcagctggcttagcctcttccgcctccggattcgcggccttagcaggggctgctagtcgtgcggctggcttacaactagatgcggctgatctatcacgactagcacgccgtggctcaggttctgcgacccgctcaatttttggcggttttgtcgaatggcatgccggccatgatgatcagagttcttacgcggaagtcttacaagacccggtcgattgggacattcaaatgatcgccgttgttttgaaggccaccaaaaagccaatcagctcaacggacggcatggcacgggtcgtcgcgacatccccctactatccagcttggatcaccacggctgagacggacttgaagcgaatgcgccaagccattgccgatcgtgatctcactactgttggccaaattgctgaaacgaacgcaatgcgaatgcacgcgcttaatttgagcgctgaacccgcctttaactacttcaccgcggatacactgacggctattcaagcagtcaacgacttgcgttcacacgggataaactgttattatactttggacgctggcccaaacgtcaaaatcatttgtgcgggtcaagataccgacaccattatgaccgggttacaacaacattttgacgctgatcaattaatcgtcgctaaaccaggtccaggtatcacgataacggaaaaataattcagtttaatttaaaatgatcagcgatggtcatgaaaggatatgatggcatgataacggtgaaagcccctggaaaactctacattgccggtgaatacgccgtagtggaaagtggttatccagcaattattgttgcactagatcaatttgtgacggcaacgatttcacctagcgaaacgattgggagcatcgtttctgagcagtatcaagaaaactcaatcgtctggcgacgtcagggagacgcgatggtttttgataatcgtgacaatcccttccattatattttagcagcgatcaatctcactgaaagttacgcccatgaattagggcgtgaacttggtgtttatcatctcggtatcaatagcgaactcgatagtgctgatggtaaaaaatacggtctcggctcttcagcagcagtgaccgtggcaaccgtcaaagcactatgtcagttttaccatttaccgatggataaaaataaactgttcaaattagccgcgattgcccatctatccgtgcaaggcaatggttcgcttggtgacattgctgccagcatctatggtggctggatcgcctaccattcattcgatcggcaatggttacacctacaacaagctcagtcaagcttaagtgatttgttgacaatgccgtggcccgacctaaaaatcgagttactgacccctccagcagccttacgtttgatgattggttggacgggttcaccggcctccacatcacacttagtcgataaagtggctttagtcaaggcgaagcaacgcagcgaataccagacctttctaaaagccagcaaagcttgtctaaaacgtatgatcactggttttcatcacagtgacttgcacgtgattcaaaccgagttgcgaacgaatcgtcaactacttcagaaattgggcgatttcagtcacgtgacgattgaaacacccctgctgcagcgtatgattcaactcgccgaaagtgctggcgcggccgcaaagacttcgggcgctggtggtggtgactgtgggatcgttttgattgatcaaaccatcgacccacgaccattattaactgcgtgggctcacgatggtatcgaacaacttaacttaaacgtgcatacggttcaggataccgttttaccaaattcttaagcagtttattgacgagcctggcagccttgccggactcgttttcagattctaaattaattggaggtggcaccgtgccacaaagtcaacaatctcatcggaaagatgaacatgtttcgttagctgaaaagtattttcatggcgaacaagccaatgcctttgaccaggtccggattcgccacgacgcgttgccggaaactgccgtggccgacgtcgatttagccaccaccgttggccagtggcattgggacagccccctctacattgaagcgatgactgggggctcacagcgaacgggcgaaatcaacgctcgtttaggccgcatcgctgcagcttgtggcttaccgattgcgaccggctctcaaagtgtcgccatcaaagatccccaagtagcccccacttttgccacgatgcgtgaccacaatccgaacgggctgatctttggcaatcttggtgccggccacccgttatctgcggcccaaacagcgattgcaatgctccaggccgatgcgctcgagctccatctcaatgtcgttcaagaaatcgtcatgccagaaggcgatcgtgactttcattggctaactaacatttcggacttagtccaagccttaacggtaccagtgatcgtcaaagaagtgggctttggtatttcccgccccacgatgcaacagctctacgctgccggcgtacgctacctagatttaggcggtcacggtgggactaactttgtcgacattgagaatcgccgacgtgctaaccgcgatatggcctaccttcacgactttggcctcaccacggttgagtccttgctaggcgttcagaaccgaccggatgatctcacggtcttagctgctggtggcgttcgacagccactcgacatcttaaaagcgttgatgttaggcgctgacgcggtcggcatggctggcaccgtgctacacgctttactccatcatacggacgacgaagtcattgcgatgctgacggattggcagtcgcaattaaaacgcctatttgcactcgtcggcgtaacgcgtgttgatcaattcaaaagtagccgtattcaggacaagattctgttatcacctgaacttgttaactacaagcaatcgattaaagattaaaacaaagcgtgtcatcacaaactacggaatgtcattctatacttgtgatgacgcgtttttgttataaccaagtacaccaaaaaagcagtgtgcccctatggcaagcactgctttttgatcgtggtaaagaaaataatttccatcatctattgattgctattttgacacgtattggtagcggttcacgtacgtccgtggctgaccagcccgtagaacaacatcgccaaagccatgatgattaatagcatccggcaaggtttgcaattccacggccagcgcatggtagtcccctaaacgatacgactgcgttcgttcgggattagcggtaaagataactaaaccattgcgatccgtgttgatgagcagtcgcccgtgagtcgttgccaacacgccagcgggttcatcctggtggtcaagcacatagcaatcatcgtattccgtcctgccagtttcttggatcaatcgatcgagctgcgattgaatcgttggctgctcacgaaagtcatacgctggtgacgggacgtagaagacgccggtcggaaccttctcgtgattcgtatgaactagcttggtcgagttgatacgtaattgctggggattaatcagtgcggcctgaccatcaagattaaagtaaacgtgacaggtcggattgaataacgtatcagcagtggtcaccccgtgatagctgatttgaacctcatcatcggccgttaacgtatagcttacagttaccgtcaagtcgcctggaaaaccatcgtcagcgctcgctagcgttgtcgtcaatgtgacagtgtcgccatcaggatcaaaacgagctcgaaaattatgcgtttgtaagccatgattgccaccgtgtagcaaatgctggccgttatttggtggtaagtgatacgtctgcccattcaaggaaaacgtcgcgttaccgattcggccagcaactcgacccactgttttgccgacttgataaggcgtctcgatataatccgccaagttatcaaagtgaagcactaatgagtgtggctggcggtcgacctgcacttcgaagtcataccacgttgccgcataactcaacacttttagtttgctatgatggatattttcaatcgtgtataaatagactgactcgccttgatacacaccaaatggtactgcagaaatcgtacgcctcattcccttcgatcagtgcggattgaactagttctgtgtcaatgtttgcgtggtaccatccacttgaacatcaatcggttccccggcaatcaacttcaaagtcgtcccatcgtgatcaaccgtgacttcaataatccgatcacggaagacctgacggaaagaatacttcgtccattgttttggtaagaacggccggtaactcagttgtccatcatgaacacgcatgccagcaaatccttggaccatcgcaatccaaccaccagtcattgaggtgatgtgaagaccgtcgaccgtatcattattgtaattgtcaagatcaagccgtgccgtccggttatagaaagccacagccttgtcttcatagtgtaagtcagcagctaacacggcatggatggctggtgacaagcttgattcgtgaaccgtcatcggttcgtagaaatcaaaattgtgtttcaattgtgtctttgagaaatcatcaataaagtcatacatcacttgtaacacatcaccttgcttgatataaggtgaccgtaagatgtggtcccatgaccaatgctgattaattggtaactggtcagctggaattgcggaaacgggcgttaaatccttatccagataaccatcatgttgaacaaagatatccagatccttgtcatatggtaaatacatccgatcaacgatatcttgccagtgggcacgttcttcagcagtcacgtttaaggccgctgcttggtcgtcactaacctgatctaaaatttcaagcgtgtacttcaacgtccattgcgccaaataattggtattaaagttattatcaacgttgttttcatattcatctgggccagtgaccccatgaatcatgtactgctgattacgtttgctgaagtgcacccggtctgcccagaaacgagaaatctccgtcaacactttactgccttcatgtaagacgtatgatgtatcaccggtataacgcgtgtagttataaatagcaaaggcaatgtcgccgttacgatggatttcctcgaaagtgatttcccactcgttgtggcattcaatcccattgaaggtcaccattgggaacaatgccccatcaagcccttgttgacgagcattatgataggcaccatccaactgcttataacgatacatcagtaagttacgggtaacttctggtttggtaatccccaggtaaactggaacggcaaatgcttccgtatcccaataagtcgcaccaccatacttttcaccagtaaagccctttggtccaatattcaaccgtggatcatcaccataataagtactaaagagttcaaacaaattgaaacgcatgccttgttgggcctcggtatcgccttcaatttgaatatctgattgttgccaccgatcggcccagcccgcttcatgggccgccaataaatcatcgaaagattgggcgctgaccgtatctgtcagacgttgaagtgcagtcataatggcatcatcagtcggataatcccgcgacgtaaccacgacgacccgcttttcaaaactaacgctggccccagcttctaacgtaccgaagtagcgatcaaccgtggctgtatcagtcacttcggccgctttatgggttaaactcgttacataactaacttgcatcccagaggtaaactgtggggtcccaaaatcatttggtaccgtctgagcaattaaccgatcatccgtaacttcgtggacgttccagaaatgttcatcgtagttcgcatcttcgttcttaacgtcagcatccagtgcggaagcaacttttaattccaccgcttgatcgctcaagttttcaaacgtcaccttctgaaccgaaagttctttttgcgcaacactcaagaaacgctcaaaggtcacgcgaacccgttgaccatcttgatcaacgataaatgatcgtgtcaaagtcccgtgttgcatatccaaatcaagtttaaaatcgctgaagttggcagttgccaagtcgatcttagtcccattgagtttgaaattgattttgatgaaattgacggcgttgataaccttgccaaagtattctggatagccattcttccaccagccaacccgggtcttgtctggataccagacaccgccaagataaataccgggaagcgtatccccagtataatcttcttcaaagaagccgcgcatgcccatgtaaccatttcctagactagtcattgattcttgcagccgtttgttttctggtttgaaatcagtcgtcaagacatgccatggattaacatcaaaaattcgtttcataagttaattcctcctagtttttgtacgtttctttgatcaaaccaactgtgcccgcacctactgcaaggacgatcccagcaaagatgaacatgttggcttgtgaattgccaaataatggatataatgcaaagctcaataaggacgcaacaatttgtggcaggcagattgagccgttaaagagacccaagtaagtccccatgtgttcgccagataaggcgttggttaccatcgtcaatggatacgtattcattgcggcccaggccatcccaaccagaataaatgagacgacaagtgctgattgactgtgaatgaagaaaattgagaagaagccaattgcaccaagtaataaactcaaagcataaccaagtttatgccgattattcggaaccttggctaaaacatatgaccaaacaaccgcggcaacggactgaacagcagataagatcccgtaccagttaccagcggcttggtagcctgcagaactggcattagtggtgtgccaaacgttggcagccattgcaccggttgagtatgtccataagtattgaaatgccatccagcagaagaattgaactaaggctactaaccagaaaacctttggtgctttcttcaagagtgccaaccagttaccaccagatttattagcgctttcatcaatgccgtgatacttcgcgtaagttacgggatcatattcccgcacccgggcaatcgtgataatcgttgaaaccactaagattgctgctccaatataaaatgaccagatcactgaattgggaataacacctttactagccgtattggcgaccccgaacaaggtcaacaggaatgggaagattgccgcaatgacggcaccagtattcaacaagaagctttgaatcccataggcgtaactcttttggtcatcgttgaccatatccccgaccatcatcttgaaaggttgcattgcgacgttagacgataaatcaagaaatgccacggtaatcgcaccaaaaactaaggccgccatggaagcgtaaccaaatccaaacgagccagaattgggtagtagtaacatcacgattgccgcaacgactgttcccagaatcaagtaaggtaaccgtcgcccgcctaaacgtggggcccatgttcggtcggataaactcccaatgatcggttgaacgatcaaaccagcaaggggtggcaagatgaaaaaccagccaaggttatttggatccgcgcctaaagtttggaagatccggctcatctgtgagctctgaagtgtaaatgccatttgaacaccgagaaaacctagactcatcatccaaatcttattggatgacagtttcggtaatccggccgttgttttagatgtttctttcacaataaagcctcccaaaaataatatcaatcgcttgagtacaagttagattataaaaccgcttccaaaattatgcaagcgtttgcgtgaaattgcatgaaggcgttttacttattgacatccgtgcctatttggcatgaaatcggctaatatcaagggttcaaatagtattagctgatacatcgattcatataaaattcacatataattcataaaaaagtcattatattgtatactgttgcatgaacaaatagatgcaggcgctgaaacgttgcgtgccgttgcactaataaaccgctccagccgacggatatcattttgtaaataaataataattttcaataatcgattgtaaatcagcatcgctttccattacccgacactaattattcagttttaaagcgccaatacgccattttctgtcgaatattggcgcaaaaaaatcgtgtgttcaggccgacttagcataaacacacgattccgaataattcagttattaatccgcattggcaatctttgcaaagccatcttgtaaatccgtattttgtgaactagtgaagttaaacgttgtggcagtggcactgtcttgcgagaccagaacgtctggcgaaccattatggaaaacatacagatacgtaattacgccactagacgcgttcggatcagtggccgcggcaacgacttggtacttcgcatcggtatcagcagccgtcgtccacttgagcttgactgtgtcaccattgaccgtaatcttatcttggtactgattgtttttgatgtctgaaggtaaattcaactcaccaatagttaccgactgaccatcataagtcccctcgtacgattggttcatggtatcttgccatgacgacataaacgaggctaactcgctcgacttggttgtcgaccacaatgccgtctgagttgccgtactagcagatgccttggacgatgatgacgactcggctttttccgatgtagcagtgcgcgacgaagatttggccgtcgttgttgccgtcgaattactctgacgctgatgtcccagccagtaatagccaccaccaagtgccacggctaataccacgatcaaaataacccaagacagttttgacgttgaacgtggttgcgcattttgacgcgcatgttgcgctgaacgggtgccaggttcaggtgcagtcggtgcagccgaaatcgatgtactggcgctcggtgcttctgaagcagccgttgacgacgtggattgagtagcagaacttacagctgacgccggtgttggttgcgctgaactggctgggataatcagccgcgcaccacaattttcacaaaataacgcgtcaatatcattctttttcccacaatttgggcaatacataaactcttcctccaatatcacgattgattgggtccatttgaccatcaacttgcgtagatcgttcccccgattttaccacggatcgaatgattcatgacggccgctgctcatcacctgttcagcgtcaatcgcacgcggacgttatgacttagtcaatatcatgtcaggttagagcgtcgcgttttcagaggtcgccaagaaccgtaagcccttaggaaagaaatttttaaccgtcttggcgacgatttttccaaacccaactggcaacccatcacaagttaagacccgaaaaccagctacaggcgcacttgtcaattcaaatgtctcaccatggacatacaatgcccactgttcacgcgttatttcagttttgggtaaggacaaatcatcactcgctaaggctaacgcgtaacttggttcaaaccgtttcttcttaaacgttcccaataaaatcccggggcgaaagaccttgagctttcgcgtaacgggcatcatcgctggcacgccgtataactgatcaccatgtgcctgtaacacgagctgtggtaaaccggccattgcttgtttttttaaaaagtccgtccatagctgccgttgcgtggcgtttaactgttcgcgaaccacttttttgtccttgcccaccgtcgtgccatgatagaccaatttggcaataaagtgaccctcaccgcgcatcaagtgcggaaataaccgggccgctttagccagttcaggattgccatccgcccattccggctttgcatcgaccatcccagccgtcttggccagtggctccagctcaaactcaggataagtttttaacagccaggccatcatctgttcgtcctcttccggtgcaaaggtacaggtcgaataaatcaaatgtccacccggacgcaacatcttgaccgcttccgtcaaaatctcccgttggcgttcagcacacgccgctggatagtcgggcgtccaatactgaactgcgtcatgatccttacgaaacatcccttcacccgaacacggcgcatccaccaagatccggtcaaaaaagcctggcaattccttggcaagggcggcgggtgtatcgttggtaatcactgtattgcgggcgccgtagcgttccacattatcgccaagggcggtcacccgttgccgattgatctcatttgtcacgagtagaccagtctgacgcaaatagcttaacagatgcgtcgttttgccacccggtgccgcacataagtctaacactcgttcaccaggttctggttttgcaaactcgccaacggtcatggcacttggttcttgactgtagacggcaccagccaagtgttccagcgcattgccgttcaccttgccataatacccaattgggctatacggaacgggtgctgtcatcttggcgcgcatcgtggccgtcaaagtcttgttcggattaacccgaaaccctttttcaacagggccatcgaaagctgccaaaaaagcgggcgcttgatcgcctagtagtcgttgatatttttgaataaattctgctggtaattgcacccaaatttcctcctcaattaaaaagcatcctcaattagattaccacattttgccccgactgtaaggtagcaaagattcgcaattaggtgggatttatgctaaattaaattaattaactgccggaaatatgggagatgtttgttgaatatggaaagaaaactaattgcgttagacttagacggaaccactttgaatgctgaatccaaactcaattcagcgacgatccaaacgatgcaacgactacaagcagcgggtcacattgttagcattattactggtcgctcatatcagggttcacaagcaatctatgaccagctgcgtctcaaaagcccaatgatcaactttaacggttctctgggccatttacctcaccaaacatgggcctcagaatatcagttcacgatcaacaaagcgattgtcttagcactcgttaaatatcgcgaacaattggggatcaatgaaattattgcagaaaataaaaacagtaccatgacagcgggtcaagatttgattgctggtcaattcttcccagagattgctgacagcccccgacttacaccagatacgttgactcgtaatccgaattccctcgtcttgctagtccagcttgatcggcgggctgccatcattgactggatcactgaacgctttggcgatcaagttgacgttggtgtttggggcggcccgaatgccatcctcgagattacctccaaaggcgtccacaaagccaagggtgtcgcctacttagcggattactttcaaatttcacggcgcaatatcatcgcctttggtgacgaacataacgacctcgagatgttagcatacgcgggtctcggtgtggcaatggccaatggtactgacaagatcaaagcaacggctgacgatgtaacggcctataataatgatcaaaacggtgttgctcgttacttgaacgattattttgcgattgcggaataatcgttcagatgcaagtagtcgacagttgtatcttaagttgctgactgcgcatcactattaattttcggactttacactagctcgtaatcaccactcaaaaatggcacttccagataaaattcaattctggaagtgccattttagttgttgttcaactatcaagggattgcgttagctaagttcagtcacgctcttcaacggtcgaatcagccaccttcgaagctgatttagccgcagtatcagtcttagacagacgtttttcagccaaatatgagtgacgcataccatagctaaagtagatcactaagccgacgatgaaccacacgcccgcgtataattttgcctggatatctaagcccataaaaacgaacagtgcgcctagaaaggcaatagctggtaaaactggatagaacggcatcttaaaggctggtaccgcaatatcaacaccttcacgacgccgcaaagcatagattcccagcgagacaaacatgaaggcaatcagggttcccgctgaaatcaattgggccagaaaagcaaacgggcaaaacgccccaatgataatagcaacgattgttaacacaagtagcgcgttattaggttgattatgatgtaacttgccaagccacttaggtaacataccatcacgcccaaaggaataaattagccgtgaccctgctaaagtcatcccaatcagcgcagtaaacattcccagcacggcaatggcctgaataacactggcaacaatcggatggccagcttgtcgtaatgcccagccgactggttcagcgttattagcatatgatgaatatttgaacataccgactaagaccaaagcaacagccacaaagagtaccaccgcaatgacgagtgaaccaagaattcctcgtggcattgttttgccaggattcttagcttccgctgaattagcggcaatcgaatcaaacccaatataagctaagaaaatcatcgataccccggcataaattccttgccagcccccaaaagcactaccatcagcgtttaaatgatacttggggataaacgggacgtagttttgcacgtggatcgccgtcgcacccacgacgataaacgtgagtacggctaacactttcaacaccactaacacgttttcgacccgggaggccttactgattccacgtgagagcagtaacgagaccagcgcaatcaccaagacggcaatcaggtcgaccacaccaccatcagtcccaaacgtatttgacaaagctttcggtagagttagtcctaatggtgacaagagcccccgcagattggcggacagtcctgaaccgacgaatgccaacgcaataaagtactccgcaagcaacgcccaaccagcgatccaaccaaagaattcaccgaacattacgttgatccacgaataagcagaaccggcaaacggcatcgccgccgccatttcagcataagcaaatgcaaccaggccggcaacgacggctgcgacgatgaatgagaagactaccgcagggcccgcatggttcgcagccaccactccgggtaatgtaaaaattgacgttgaaacaatcgtccccacccctaaagccaagaagtccttgaccgtcaatactcgagctaggtgagaatctttgtcttcatatatgcttggatcttcctttaaagttaaccgttttaataaccgttgcatcaaaatcctccttattttaccaaccaatcttgccttggggccgtttaaccaggccctgttcagcagcagccattgcctcatctaatacggttaacgcagtatctaattgcgtcttcgtgatgactagtggtggttggaaccgcaaaatatttcctttgagcgttatcatgacgacaccccgttcaaaagcggcataaatgacgtcactggcaaaatcaggatcaggttgctgactctgccggtctgtcaccaattcaatgcccccgttcagcccgtacatccgtacctgcccaattttaggatggcgttgttgaagcgctaaaaactgttccttggcatagcggccataattggcggaacgggcaaccaactgttcatctgctagaacgtcgattgtcgccagcgccgccgcacaacaaaccggattggccgccgtcgtaaaggtgtgcgccggcgctgctagactctccatcacttcacggcgaccgatcactgcactaagtggtaatcccgaagccagtgatttgccaacggacattaagtccgggcggattcccgggaagttttgaatgctccacatcttcccggttcgtcccatcccttgattgacctcgtcgacggcaaataagataccgtgctggtgacaaaaatcatagactaattggacatactctgctggtgccttgcggataccgccatcaccttgaatcggttcaataatgacgcacgcggtttcctccgctggtaagtatgagtcaaatggtgccttgaacgcttcaaaatagcgtaatgcaagttcatgttccgtctcatgcggcaacgtacgataacaatcaggatacgggacgtgcacgatcccaggtagtaacggtcccatcttacggaccatattcaggctaactcctgagagtgacattgagccatacgttgaaccatgataggcatccgtataggcgactatgtattgtcggttagtataggcccgtgcaaatttaataatggcatcattggcatccgaaccagagttaccaaaaaccacctcattatcagtgccgggagctgattttgccagtcgctcagccaatcgttgttccggttgatgatgaaaatatgctggcgtgtaatgaatcaacttggctgcctgttcctgaatggccttaacaacgcgagggtgcgtatggcccacgttaatggccgaagcactggctaacaaatcgatgtattggttgccatcaacatcggtaagcatggccccgtgagcatggtcaataactaaatcatagtaattgattcgtgccgccgtcgccatataatggtcttcacgttcaataagttgctgatccaaacgatggttttgactaatcattcgcaagcctccattaatttaataagacttattttaatcatattttaatttatatgcaagtccttgcgcccatatttttgtttacaaatacccgtctttaccagcatagccctagctttagcgttaatcaattttttaattaataagatgtaaattaaaaaaatcaccggttcattcaaccaattgctaacagcgaatcaacaagctaggatcattttaaattgtgaacgcgaccaccaaacttgccttgctggtcgccatcattttcctcagctcacctgctgcgcgcgaggtccgtggcgtgctagtgcacgttgggaatgggcgctcccacattgaacgacaccgctcagtgccacataagcggtaagaaaaaacgattatcatccgtcccctatcaagggtcagacaacaatcgtttgtttactcagtctcacttggccttaggttttaagtaagcggctaggccccaacagactagccctaagacggtcgttgccaccagcaaacgcaagctttctagatttagcccccgtacggaccaaggatggtaagtttgcatcatagtaggcaccgtggcggcctgcgctaattcgcagccggtcagccaacccgtgaaactcgcaatgatgattgccaacacgcggcaacgtgttaacgatctgattccgtcgtacttgacttgtaactgatagcgtgttttcatcgaaaaatcactccctcgtgaattcgcgacctcgcggcaatttgattagcctgaatataacacgtgagcatcgtgccccccaaccgtcaagtaccattcacaaagtatctttacagtaagtaactttcatcacgccgctttacattgtgaatgtaatcgtcgtcccccgggtcatcacgggctgctcgggtgctggtaacattcccgcttgaccagctttaagccgctgagctgctaagtgcgtaacggccgcatactgagtcgttgtgattggcaccgagcagattcgctttgttcgtgactgctcaaattgataccactgtgcggcacgtaatggcactggatgccgctgtaaatcccccacatgaattttaaacgttgattgacgggtcacaattggggctggtagccagacccaccgtgttattgcttgtcccatctcaccaccaccgtttcgaatttgttaccgttattatagcatagcaaaacggaccgctgcgccccattaagggcatccaacggtccgaaaattcaatgttgttttttgtagcctgatttttctaaacgtttaacttgattttgtaaatgatcgaccttcgtcgtcaacgtgtcaattttaatcagtagttgtcgcagctcgtcatcatgctgtggttcctcgatcgtgacattctgactggcttgcgttgtgaagaagtcagtaatcgtactcgttaacaaaccaataaaaccaattccaccgaacatcagcccgaccgcgatcactttgccaacggcagtatggggcgtatcgtcaccataacccacggtagtcgccgttgtgatggcccaccacagtgaatctgacaggctttgatgctcgaaaacggaaaagagcaacgcactaagaacaataatcgcaatactaattgaaaacaggtagataaacccggtgctatagataaagcggtgaaaatcgtgcgtccacttaccatccagtccgagcttccagaacaaatggtgatattggaccatccgtgccaaacgcccaagtcgaaagagtgcaaacaccgggtgcatgggaataatccccatcaaatcgaacgctgaatgaatgagaaaagtcttccgatctcgagaacgaattaggcgcacaaagtagtccaccgcaaacatgactaataagccgttactgatgcgggtttcaacgtaccaatcaccgatatgaaacgataataggatcacgttaactgctgaccagagtgtcaaaagtgtgacaattaagtgatacaccgcaattcttcgttgctgtcgctgttctgtttccatcctgcttacccctattttataaactggtaataatatagtccactttcataaaaataaccacgataagtgcgaaaaattaagtgagctttactaattcgttacaaccaagtccctaaaacaaatagcactgggtatagaatgaagaacagcgaggcactcttgaccgtcgtaataaacgtcttctttttatcttgcacctcaaagaacgggcgcataccttgccacataattggtagtaagagtacgacccaaatcgtaacaatgggtgctagtcccagtaagacgttcacgagcggccaaatgccaccaataattaaaaacgcttgaatcagccgtaccgaacctggcttaccaaggtagtaggccaaggtgtagcgatgattcaaaatatcttcatcacggtccgctgtgttattagccagttgtaggcaaaagaaaatcagggtcagtggtaaacatagtaagaaagtcgtcccaacgatcgaccaagtcaacggatgctgtccatacgtcgatacgaccacacaggtcaattcaattaaaaatgcaattgctaacgccacgaccgtctcacacagcggggtcgcgttgattggatagggcccagctgtgtaaaaaataccaatcacatagccaactaatccaaggacgagcactaaccacccagtccgcatgacaagccagattccgggaatcaatgaaatcaggtacaatcccaatgctaagcggccgacacccgctacgggtaactgcaagcgaccaatcggattcgtcttctgcgcatagccttcccgatcacgagcatgccgataatcataataattatcagaaacattgacggctaaatcaaaaataaatacgctaactaaacacagcgtcacgttaagccaattcaccgtacctaagtgatattgcgcaatggcgcttccgagaacaaaccacatgatattaagtggtgccgtataaatttctgtcagctcatagaatactggccaagttagccattttttaaacattttaacaactcccccaccggttatttaaatcgttaattatctattgggaccttattgaccatcgtcaccgtcgaagactttaactatcaaattttaacaaacttcacgcctaacgcaagcaaagcggatagatttaacaaaaaaattaggaccagtatgcaaccggtcacttggaaatcccacgccacatgctggcacccctgctagccatcttcagaccagcgtaatgacttcatagcagccattaacatccttcaatgataagtataccgtaactaataaattcatactgcccattttagcactgatcctagtcaaacgttgacacaagcccttcgacgacagcagcagacccaaaaaagcatttcaagagcctaactcttgaaatgctttttggtgactaatctacttggttttctccggcactgagagtgggaggtccagccgtgttaagtcagcatagctttcacgctgcacaacaagttgactatgtccctgttcacaaaaaacaacggcaggtcgtggattccgattgtagttgctagccatcgaataaccgtatgcaccagtatctaggaccgctaacacgtcgcctggtgcagtggccggtaattgctgattccagatcaacatatcacctgactcacagtatttaccagcaatcgaggctacctgttcagctggtaaggccggattcttggctaataccgcttcatacttggcctgatataaagctggccgaatattatcacccatacctccatcaacagacaaatacttccgaatgcccggaatatccttctcatcgccaatcgtatacagggtcattccagcggtagcgactaacgagcgtccaggctcgatccagatttctaacattggaacttgtttggctgcagtttgcgcgcgcgtttccttaataattgcatcgacaaaatcggttggctgtagcggatgatcttcggcagtgtacttcacgccaaagccaccccccacattcataatctgtgggtaaaaatcaagttcgcgttgccagcgagcaaactcactaacgagcttatcaacaatcatcttaaaaccattcacttcaaaaatctgtgacccaatgtgacaatgaatcccgaccagtttcaaatatggtgcggcttgcgcggctttgatagcctggtctgcttgcccactgtccaaatcaaatccaaacttagaatcggcctgaccagttgaaatgtaatcatgcgtatgcgctgagatccctggggcaatccgcaacataatcgtggtcggctgttgccgttgcgtcgtcaacgtcgtcagttgtcgtagttcaccgaaattatcgaccacgatggtaccaacaccggcatctaaggccatggttagctcggccagtgacttgttattaccgtgaaacgagacggcggccattgggaaatctgcttgttgggcggtatacaattcaccaccagaaaccacatcacaatgaatgtgttcttgggcgatcaattgatacatcgcgaccgttgcaaacgccttactagcataactgatttgatagtccacgtggttttcttcaaaaacttgcttgaatgctgcgatttcggcacgaatttcaccggtatcatagacatatagcggtgtttgatatttttttgcaagggtcaatgtatcgacgcccccgaccattaaatggtgcgccgaatttaatgcatccgtcttaatttgttcgttcacagtttaacctaccttctaaacttttaaaaaaagccggccacgtcatattcgaccggtccggcaatgaacaacctattctgcttcttcgtcgctctttaagacaccaccaacactatagcgatttttctgcatctcacttaaaatcacgtgaatgtgttctgctggtgcaccggtattcttgctgaccgcgtcagtaacatctttcaccaagtttttaagttgttcttgtgaacgaccagcaattagatcaatgtgtacgattggcatgaggccacgctcctatcttaattcactattttcgaatgttttaatcttactttaatcttttctattttgcaagccacgacgttgttgatttaacggttcttttctaatgcccagcacgctgaccaattaaggctaccttgcaaaactaatcagaagcacaaaccgaaaacccccattgatgactaaacatgctaaaattaatttaacaaaaatgattatgccacgataccgccattgactgctcgtaccgtggagaaagaaggccccatatgttgactcatcagtttaatccttattccgcctgcactagtatcctagtgggtaaaaatgccagcgcggatggttcgaccatgattggccgtaatgaagattcacgcgccgcttgggcgaaaaaaatgattatccacgcgcaccgcgaattcgaagaaccacagaccttcaagtctcaggatcaaactcatccctttaccatgaccctgccaaagattcgtgcgaaatacacagccacccctgaatggactgccgaatatggcctgttcgaggaggatggcattaacgagtacggcgtggcaatgagtgctactgaaagtgcttactgtaatacacgcgtactggctgctgacccgtatgttaaggacggcatcggtgaagaagcaatggtcactgtcaccttaccgtacattcattctgctcgtgaaggcgttgaacgtctcgggcatattattgaagaacacggcacctacgaaactaacgggattctttttagtgatgtcaacgaagtttggtacatggaaactggtgctggtcattactgggtcgcacaacgaatcccggatgatgcctatgcagtcgttgctaaccagcttgcaatccaagaaatcgactttagtgaccatgacaattatctttatgctaaagacattcgtaattttgtattagacaatcagttagcttcaatggacaatggactgaatttccgggaagtcttcggtacggccgacctttctgatcgatattacaacacgcctcgcgtttggtatggtcaaagatgctttacaccaagtgtcacccagacgcctgagtcgtttgacttaccgttcattcaacgggcggatggcttaattcatattgaccaagtccaaggctacttagcgtcccattatcaaggcacaccgtttgatcccgtcggccagggcactgctacggagaaacatcagtatcggcccatcagtctcgccaagacgcaagaatcacacgtcttacaattgcgaccggaccttcccgtcacgctgagcgggattcactggctggcgatgggtgtagccgctgaaagtgtctacgttccattctatgccggtgctacgaccactccagcagcttatcaagttgctacagaaaaatacgatgctacctcagcatactggattttcaagcacgtcggtatcctagtcgacgcccactaccatgaactacacggggaattacaaacagtacaaaaggaattggcgattcaacttggtcaccacattattgtcacggatcagcaagttgccgctttgactggcgacgaactcgctatggcactgaccaaagccaatcaaaaagccgctgaccaggccttgaacacaatgcaagctctcgccgctgacctgattactaaaagcaccgatatgtcaccgttgaattacgatactgatttaaacctataaatcacaccccctatccgtttttgagggcaaccattattgatgtggcgcggctttcggactggtcaaaatgcgcttagttccgttactatccaaataaaactcggtgcacgccgttaacctggcaatggtgtattttttcttagaaaccatcagcatgattatttctaagggaggttaccattgatgaccacgttaaagtatctacgccatagtatcctaattgcgtgttttttaaacttgatttttgccctgactcattgggccggcattgccagcgaccatctgttgatcgctacaaattacgggctcagcgccctgattattttaatggttttgttgaacacgatcgttttgacacatcatccgacaatcatgctcccccagcgacaacaaatttggctgatcaactttgctgccctactgattgcctttctgaccgagtggttatgagcattgtgcatattggttgcgttttgtcatcacttatcgcaaactaaggttaattcttatattaggaggcgctttttatgagtgatgttaacaagaagttcgatagcaagaaggaccagttgagcggcaaggccaaagaagtcgaaggtaaagtaaccggggaccgtgcacgtgaagcccagggcaaaacacaatccttaatgggcaaagctaaggacaaattagctgacgcagaagaaactgttaagggcgtcgtggatgaagctaaggataaaatgaagaagaaatctgacgattaaaatttgtcgtgggcacggcgcaaacggatggtgatcaaaatcaccatccgtttttttatgattacgccacttcaaatgagagcccccatcggcgcacacaaaaacaacttcgagtaagctagtacctcgaagtcacctgtggggctgtttagggtgatgtttaacattttttgatgccgagcgtaacagccaggctgtcaattggcactgttcaattgtgttttgaccgtcgaacccgtgcccactgaaccacgaacatcattatcagaacgacggcaattgcaccgattgcggctggtatcacagtcattccggctaactcaggccccatcggccccagcacaccttcaccaatgagtgccccaagaacgccagcaataatgtgaccgatccaaccccgcgattgactggggctcatgatagcacctgcaaaagcaccaaccgccgcgccaacaatcattacccataaccaatgcatgctgtcatcccctttttagcggcggtgtttgaactgccgcacttctcgaaacacagtcaatcctaattgcccaattgcaatcaatagtgacaatttaccccaaaaaccaggggtctgtcgtttaattttagccattacggacacctccatcttttgataacgctaacaagtgctacttcaacaaatccttttatgcctaatcacaattactgcggctgaagcgcctgggcagcaacggttccgatcacaataagtatcatcgccccgctcacgactggcaacaacgtcattccagcaactgttggcccgaaccatccaaaagacagctggccaccaagtgcaccgaataagcctgcgattaaattaattgtcgtttgacgccgaccatgtgcgcctaccgcatttgcaacgatacctattgttagtcctaatatcgcaacacctatccatcccattgtgaacacactccatcccgatattgtgtgattaaaattatcataactataatatttatattgagcaatcaaaatgctcattgacccgactaattcagtaatgatgcatatcatttccagtcaaactagtgttcaagctatactgagactatcaaaagcttaccccgcattagtcgtagcggtgtttttggttttattaagcttcataatccgtcaaatcagccaagaagcgttgaatcaccgcaagttctgctggtgagtagtgttcatgaaggagcgtgattgcttgatgattgcgggttgcatgcatcttatcatgatagcgggccagcttacgaccactcggcgttaagcggtagaagatctttttgtgatcatcgggttgctggaatgagccaattaagccctgcgttacgagtcgtttggctgcccgggtcacaccacctcgagtgacgccgaggttagtggctaagtcgatgcccgtttgtggaccggcctctagttcagataataaatgtaggccaacgatggaaatatccggcaacaggcggcgtagattggcttcggtgatatgctgctgtaaccatttctgttcaccagtagtggaagcacgcttggttcgaatcgttttgagctgcgttagaattgtctgttccgtggatattgacatcgattgatcccccttagatagttgtgcgtcacggcgactggttctcgtggtgattagcgtgcaattatcaattaatcattaacttttattactattattataccggttttaaaattcaccggcgagtttttctgctgctacctgtgcggcagtgatggcctgttctcgctgttctggaaattggtccaatccttcaatgaagatggttcggtaatcctgaatcccatacagttgcatcatgccacggaggtaggggtcgcctgcttcaacctggttgtgttgatcaggttggtgatagtagccacccgcagcctgaatgtgtaagacgtgtttgtcgggtaataagccgaccgggccgttgaccgtgtacttaaaagttttacgggcgactgcggttaagtctaagtattgtttgagttcggctggaagaaagtgattgtacattggattaacgaagacgatcttgtcggctgctagaaattcagctagccaggcggcgtgacggctaagtagttcagcttccactgacgttagttcttcaccgtatttttgtttacgccaagcttctaaggttgtgtcgttcaaagcgggaacgccgtcctgataaagatcgcgtgtcgtaatctcatcgttcggatgggtttgctgatacgcagttttaaaactcgctgcaacggtcagtgaaagataaaaaattccccacacattcgaaaatgcgtggggaatttaaaggatgcacgattaattttgattaaccaatgctactagcactaggttggagcgactttacgggtaaatacggtgcaacatacgtggaaacggaatggtttcgcgaacgtgatcttgcaaagtgatccaagccagaaaacgttccagacccataccgaaaccggagtgcggcaccgaaccatatttgcgtaaatcgagataccactcgtaatcctgcaagtcttgaccgctggctagtaaccgttccttcaagtagtcataatccgttgagcgttcggaaccgccgatgatttcgccgtaaccttcaggtgctaacaggtcagctgcaatgacgacatcatcgcgcgtcgggtgtgcctgcatgtaaaaggccttgattgctttgggatagtttaagacaaagactggttggtcaaagtgttctgccaaaaatgtctcttccggtgagccaaagtcgacaccccagtcgacgtcaaagccgttcgcttggagtagtgtaatagcatcgtcgtacgaaactcgcggaaatgggagcttggtgtacttttgcaacgtcgcaacatcgcggtccaaaacggccagttcgtgggggcaatggtcaatcacggcttgaacgaggtaggccaccaattgttcttggacttccagactttcatcttgatgcatccaggccatttcaggttcaagttgccagaattctgttaagtggcgacgagtcttggatttttcggcccgaaaagttggtccaaacgtgaagattttgccgaacgccgttgcgccagcttcaccgtataactggccggattgtgataaataggcgtcctgaccaaagtaatcagttttgaataattcagtcgtcccttcaggagcggaaccggtcaaaatcggcgcgtcaatcttaataaaaccgcggtcattgaagaactcataaacggctcgaatgacctcgttgcgaatccgcataattgcgttgggacgcgatgaccgtagccaaagatggcgatgatccaacaggaaatcaataccatggtccttgggcgtgatcgggtagtcgtgactagtcccaaccacttcaaattgtgagatggcaagctcgtagccaaagggggaacgggtatctgcatgaatcgtgccggtgacccagaggctagtttcttgcgcgaggtcggtcagttgtgcaaaagctgtttcaccgagctcgtttttgagagctactccttgaaaagttgctgtgccatcgcgtaattgaagaaaggcaattttgccgctagaacgcttattactgagccacaccccaattttaacttgttcattgacatggtcagcggcgttgataatactaatggtttccatgatattgatcactccttcttgttggattttaaatcagattaaagtaaatgaatgttatgttcggtacattggtcgatcatggcttgtggccacaaggcagcttgtacttcaccgacatgggctttgccaagtaataacatgcagagccgtgattgaccaatcccgccaccgatcgtgtaagggacgtccgcgttcaagatcatttggtggtatggcaagctaagccgatcttcggcgtccacgtctttaagttgtttcttcattgattcagcatcgacccggattcccatacttgagatttcgatagcttggtctaatggttcataccagaagaggatatcaccgttcaacttccagtcatcatagtcgggggcgcggccatcgtgacgttcgccggaatcaagcttccagccaatttgcattaagaagacacagccgagtttcttgcaaatggcgttttcgcgttcgcgcggcgtcatgtcagggtacatgtcttcgagctcttgtgtggttaaaaagtgaatttcgtctggtaagtggtgaacggcctgtgggaacttgtaccaaacttcgtgttccatgtgcttgatcactttaaagatttgacgtaccgtggctttcaaagtttcaacggttcgttcttccttactgatcactttttcccaatcccattgatcgacgtaggcggagtggtagttgtctaaatcttcatccttacgaatagcgttcatgttcgtgtagagaccttcatgcatgtcaaaaccgtagcgctttaaagcgacccgtttccacttagcaagtgagtgaacgatttcgatttgttcatcacccatgtcttgcatagtgaaggagacaggcttttcgacaccatttaagttatcgttcagaccagttttcttttcaacgaacatcggtgctgaaagccgagataagtttagttgcttcccaaattcatcttggaacgtttcacgaatgtaacgaatggcctgttgggtttctttaacggataatttaggatcgtaatcctttggaataattaaatgcatatgcgtggtctcctttaaaataagttcagattttagttacaggataaaagaaaagagccttccatcccttgaattatcaagggacgaaagactctttcgcggtaccacccaagttgtttaccttacagtaaaccagctttaaaatagtgtacaaacatacaccaccgatggtaacgtaccggttaacggctaatcctactttaacgaggttatttcagttagcaactaagaaagtgtttttcggattagtcaagttctggtcgggtttccactcactcccgattcactggcaggttgactaatcgtactcctctttcctccgtttttatcttgtgacatttatattagcacgattctggtatttgtaaaccactaaattaaaaataaattagtttagtctcatgaattcaccataaaaatcttagctaaaaccgcaagctaacgggcttaattaatcgttcaaattataacgtaatttcattttttcagaaccggcaatgaccatatcgccgagtaatttagtttgtaacttcatcgcggtatcggccaattgttggttagccgtttcaagataggccgtgacgtcttggtggttagccaagtcagcgtcggtatcattctcgattttacggtaagcactcatggcttcgagttcgtaactattccgcatatccacgtaaaagtcgtagtcggtgtcacccaaaagggcggttgtacagcttaaccagtacatgtggttgagattaaaggtgccgtccgcatctttgtagctagctggcgtgtcattgacatttgcatagaatggtacgaccgtgttgaaggtattggcaccaaaggctaaccagtgaataccggcaacagcagcggggacgttgttgcgaatctgtaagatgtgcacatcgtggttacggttgatcccgattggccggaaaagggttttgtcagcttcagagccacttccgtaaacatcgtatttcgtgttttcaaagtgagaactcaaaacgaacttgacgtcttcgatagaaatcttacggttagcatggcagatgaatggtaagtcttgttccattggatcttgtacaacgtccggcgtgaagtatttctgaccgaaccaagcccgggggttgttgtaaaccgtatctttgattgaagcactcccaaagatatgccgcaagttgacacggtcaaagtcaggattcaagtggtaatcttcaatcaattgttcaaggtcagctgaagctaaggtatcatcagcgttaaaatcgaaatcgtcaatattcatgcggttcggagcaaccacgtaagcatcgtcaggaatacgtttagcagcccagtggtgaccaccaatggtttctaaccaccagatttcgtcttgatcagaaaaagcgataccgtttggttcgtaagtcccgtattgttcaagcagggcacctagacgagtaacgccttccttggcgctgtgaatgtatggtaatactagggtgcaaaggtcttcttcaccaattccgccggcaacgaagggatcgattcccaagatacgcgagttcgtggtgatggtttcggttgcggacatggcgatgttctcactgttgatccctgctgctggccaggtcccattggtcaagattgagttgggaattgaagtataccgtaagggattgtcaggtaagtcgacttcgaccttactaatgacggactgatagtgccggggttgatctgcgggattgaccacaactaatcgttcggggtctagggcttcgtgaccatcatcgtttcgtgaaataatggtcgagccatcgattgaggcttttttaccgacgagaatcgtggtacatgaacctttaatacgtttttccatgatattaaaacactccttttaagctattaatatcattatacgctttctgagcgggtcgcgatagaacgggcttttttgagaatataattaatcccgctaatactaaaaccggtggccgccgcaatttcacggtaagtcttgccacgtgcccgtaactggtgaacttgcgcgtggctggcatgttgtggtgtggggctaggcgtctggattgacggaaccatcgctggcaccgtagctggtagtgcgaccggtgcaggcggtgtagtgattaccggcgtttggtgagttagttcagcaagcttaaccatgactaattcagttgtctgaacatcccaaatggcgttatgctggtgtggattactgatattaaagagtgcggctaagccatttaatggcagatcatggctaccgaccttatggttgccacgattgatcaaggtattcgtataggcttgggcatcaaaaatcgtgaccgggcgactgactagctgctgttcggtgggggtcaattgctgataatactgagttagtaataatcgaatgtgtttcatgtcctgtgtctgatcccaaaaaacgagggggagttgtggctggataacttgctggataaatgcttttagaatcgtcaaggggtcgccttgtgcctcgtaagcgacggtcgttaagccagttgctgataaaccggccaactttttgtcaggtaaaaagttaggatcatcgaagtaacgattgaaaaaaagcgctgtctgcgtatgatgggaaaaaccgatggcactgagctggaagatactagcccgtaattcgggtgattcgatgatgtgccaactgacggctttagcggagccattacgacgaaagcgagtgccgaactcgcagtcgatgattacgtaagcggtcggacattcactcagttccgttggtgaaggtaggatcgtgggttggcttagtacactggccggctgcgcagggggaaactggtatcccagcgtcgccagaaattgaacggtatcctgcccgagctggttattggttactttagcgaccttcttttcagttaagacaatttctttgcgcatcacgaataaaatatgatagcgctgctgttcatcacagataatttcggtcacgttgccggcaaggctgtattctgaagcgagtgctaattgatggtccttttgaatacggtaaacgggatggttgacaaagtatagacaattcaagttatttgagatcttacgctcaagtaaggttaggttcgttggcatcatcgacaacagctcctctgatctaagtacttatattttagcggctttgtacattagctggctagtgtttgcactgcagatcgaaccatgaatttggtaatcacgaattggtgcctggtgttatagtgaccgtagagtgctagttgtgcgtcaggttggagttggtaaaataaagtcaacgcatgcttgacgatgatgcaattgatgggcgtaggttcggtcgcctttaatggcgtgacttgtaagtacaacataaaggggtccaactttaatatcttgcttttatttaaatacttaacggttagattttctgactgcatgctaatcacctcaatactagtatacgaacatacgttcttgaatgcaagcaaaataactgcgttaacaaatttattttaagatgagcactaggtgcactggactgattcgaaataatttattaaaaatcgcaacgaatcaggcaagtcacggggaaaaagctacaaaaaattgagaactcttggtatgatgaatagtagtgaatgagaggaggccgagtcatggatcgaggacgacgcgcaacgctggaagaacgaattgcgatcgtaaagtatacgctggaccattgcaacgattatcgagaagccgctaagcattttaatgtttcgtatccacaagtctatacatgggtacgaaaatatcgacaacacggcatggaaggtttggtggatcaccgtggccgacccaagcaaggctaagtcagcattgtacatataaactgtgtgggcgagtgccctttgatggccaatctgacatggtcgtttaatcgatatcggtctctttaaagtgtccgttcctataaaatcaatagggacgggcacttttcggtattttgatagttttcgtggcgcaagtgcgacttaacgtacctagtgattaccggggcgcgttcttgtcatgggccggtattctcggtagaatgagagtattaattcaaagagggagtttacgtgtgatgattgacttagcggcggcacagcaagtattaaagaccacgttcggatatgatgaattccgaccggggcaaaaagcagtgattgaacaagtgttggccggtgaaaacaccctagcgattatgccgactgggggtggtaaatcattatgttaccaaatcccagcgttactttttcaggggctgaccgtcgttgtctcaccattgatttctttaatgaaagatcaggtagacgcgttaaatgataatggcatcgcggcgacttttattaacagttcactggatttccaagagattaacgaacggctccaagaactacgggcgggggattataccttactttacgtggcacccgagcggttagattcggattactttattcaagcgctgggccggttgcccattcaactgttagcaattgatgaggcccactgtatttcacagtgggggcacgattttcgccctagttatttagcgctcagcacggcgatcgaacaattgccgacccatccgcaagttctagctttaacggcgacggcaactgagcaagttgctgcggatatttgcggccgcttagcgatcgatccacaacatgaagtgaatactggttttgcccgcgataacttggatttgacggtggtcaaggaccaagacacggaccgttacattttagattatttgaaagttaatcatggtgaagccgggattatttacgccagcacccgtaaagaagtgatgcgtctgacgagtttgttgcaaaagcatgatattaaggccacgccgtaccacgctgggctagatgatgcggttcggcggcaaaaccaagaggatttcttgtacgaccgtgttgacgtcatggtggcaaccaacgcgtttggaatgggcattgataagagtaacgtgcgttttgtgattcacgctcaggtccccggaactttggaagcttattatcaggaagccggtcgggctggccgggatgggttacctagtgaagcgattttgatttttcgaccggttgatattcaacttcagcacttctttattgatgagtcggagatggatacggagcaccgacacctggcgtatcagaagctacaggtgatgacacggtatgcgaatacccagggctgtttacaacagtttatcttgaaatactttggtgaaaaatccgcgccgtgtggtcggtgtagtaattgtactgatcagcgggagtcacaggatatcaccacggcagctcaacaagtcttatcgtgcgtcgttaggcttcattcccggttcggtaaaggggtcgtggcccaggtattgacgggcgctaataatcaacgggtccgcgaatcgaacctcaatacgttgtcgacgtacgggttgatgtccgggcagcgacagaagagtgtcgtggaactgatcgattttttgactgcgagcggttatttgcagtcggtgggtggtcagtatccaacgctgacagtctcagcgagtggagtggccgtgcttaaaggaacgaccacggtacaccgaaagacggcccaaaaggtgcagcagacggtgccagagaacagtgccctcttcgaacaattgcggacacttcggcgccaattggcggaagaacagggcgtaccaccatttgtgattttttctgaccggacgcttcattcgatgtgtgacctgatgccagaagacgacgcagctttcttaacggtcaaaggggtcgggaccagcaaacttgaaaagtatggtgaaacctttatggcgacgattcgagcggcagctcatgcggaatcagcaactagcaccgatgaggaaaccgattagatggctgattggtaaactacgagatgaaatggagtaacacgtatggaatttacttggcaacaccagggacaaccaatggcaatgaaacgattcttgacgacgcatgccatcagtatgcgaacaatcaaggcaatcaagcatggcaccggcgcgtttcttgtcaataatcaagttcaaacgggcgttattaccattcatgatggcgatattgcgggaattcaactaccagacgaggcaccggatacagcggtagtcgtcagcgaacaaccaatccaaattgagtatgaagatgctaattggctcgttcttaataaaccagccgggttaaccagcgtgccggggcctagtaatcggaccgatacgttggtcaatcgaatcaagggttatttgatagccagtcatgccagtaatcaacgaccgcacctgatcacgcggttggaccgggatacgagtggccttgtgttagttgctaaacatcgggtggcgcaggggatgctgacagagccccgaattgcggcgcaattagtgaagacgtatcaagcttggatcgaagggaccattacgccggctagtggcacaattgatcgcccgattggccgggtggctgacagtcctcggcgagtggtcactacggcgggccaacgtgccattacgacgtatcaagtggaggcggaccaattgcagcataacgtgagtcggttacggttggaacttgtgactggacggacgcatcaaattcgggttcatctaacggcgcttgggcaccccttattaggtgatacgctgtatggcggtaacttggcgtggattcaacggcaagccttacacgccgctagtttacagttctttgaccccttttcggaacagactttacactttgaggcggcattgccagctgatctgcaagccttgaatcacgactaagttcagtttaggatcagtgaccatccggatgaatggttaataaaaatcggcactgctagaatgcgttgaacattctggcagtgccgatttttggttggcaaccgtctaaaatcaagctaacgtttagcgggtaagttgcaggcccgcgttatcctgaaggctgcggtgactattgaatgaggcgctagtgcttacgactgactaagtggcgcgttatcagccgttagcgtcgcaaaagttgcctgtaattgctgtaatggtgcggttaacgtgagaaaataaatatgctcgaccccgttactacgcatatcaatgaccccagcttcacgcattaagcgtagatgatgtgaaacggcggggcgtgaaatattgaccaaggcggtaatatcagtaacgttgagaccattatcactgttccccagagcaatgataatctgacgccgaattttttcggcgaaaatattaattagtgtggcactttcaataagtgccgtttcggattgttgaaaattagccatggtgactgcgtcctttcaaattcaatttacacttaaggactaactccccccatcggcagtacgctgaattagttgttaagtgttggtatgacagctcgatgttcaagttctggtgaaatagttgcagccaagaaaactttaagtctacaagttgtcagttagactaattgttattggaacgttcgtacttatgtataattaaagcaagtcgttaatcgattgtcaaacctttttgttaaaagtaagtactattagcgggcttaacaattgttgttcgtttgataaccatatttttatgttgaaatgcgttaaaataaaaatagcttttgaatgaatgatgggagtggaaaatgtgaaagtcttaggaatattaggtgcgcatcgcgctgatggcgtgactgcccagctactgcaatccgtcttaaagggggccgcggccagcgctgacacggaactagtcaacctcaacgattatgagttgcgaccagatcacgatagtcaaccgaatgctgacttagacgcgctggaagcaaaattaatggcggcggatgtctgggtattagctgcaccaacctatttggggagcttatcgggggtaatgaaaaacttctgtgactgttttcgggggcggatcgcacggtttaattccgtgggtgaagcagtacctgatcgctttaagaacaagcattatgtgacgatcacggattgttacgcgggtggtattgaaaattatttgaccggcgtgactgacgcaacgtttaaaacacttgataaatttttgacgatgggtggtctcatcaaattacgggagattgtcgtaactaaaacgtggggtatgcaaaccatcacagctgctaagcaagcagaatgtgaacgggtcggcgcgcgggctgcacataaaaaggaaagggatgacagtacggtgaaacggtatattcaattattcttcatgattgcggtgatggcactactaacaatgggaatcgaagcggggattcaacaattgattccgctgaacaatttttgggcctactacggcgtctttgtcgtcgtcttttatgttcttttagcaatgattttacatttcttcactgttgttaaacaccggcgtcgttaagggatacggcatgtgcattcagcaacaacgacattaaaattcaattgattagcaagctgggcttggcgtcttaatcgccggaggtcagcttgttttgctataataagaacaattacgaagtaccagcgattatttcagtgtccacgcgtataattaatatggtatcgtcgaattagaaaatgaggacacttggtactggttgccaggcgtatgaaccataattaaaacatgttaaattagatgaatttttatttggcagcatgctgtgattggtttcggttttggcgcatccaagctgccggtttttgaatctaactttgtcaaaaactaatcattggtcatgcccaaaaatgtgttattgatttcaaaattaattttgttaaataaaggctgtcaatcaaggtacgaggaggaatagcatgcaagtttttggacaatttattgcaacagtcggttggctaggattggcactagtcgccagcgaactaggtgcgacgttaatccattggctcggtcagtgggtcggatttcgattaattggtgctcgaattgtccggattaccggttttcgacttcaattaagtcgggttcgtggtcattggaaattagaacgaccgctgacgcgtcatccacatatcgtggcagcaccctcggcggatgccaaacggttcaatcacgccatttattgttttggcggtggcctgttcaacttactgacggtcatgctcagtttaataactctgaatcaatttaagtttagtttcgatttatggttgtttgcgttcattatttggatctgggtcaatacgttgaaagccgcccaattattaccaatgaacttgcacggttatcccacggcgggacaggaatttcggcaggcacgcgaatcaacggcggcgatgaccgccgcgtatgtcactgcgtgtgctgcggccgttaaggttcagaccggtagtgtccgtgaccttgatgcgagtatgattgttatgccgcgcgatggtggcaatcggaattatttagtcgtccggcaagcatggttgattctggaatggggacttcaacatgggctggacacctccgaactgttagcggggttgagtcgcttggagccaagtttcaatacgttgccgccagctgatttggcgaagtatttagatgcaacattgtactggaacttggtcaccaatcatcgtgacccccagatcatagcctggtatcaagatgatggtgttcaacagttattacgtcgctaccaacctttggctcattataagttaactgccgtttatgaatggcgggtccatcagcagcccgaacaggccctagaattgattgaaaagggactaaaaattgctcagcgcctccacgatgaggaagaaattgcttggctgaaagctttacgcgttcaagtaacggcctagattaccgtagaaacttagattctgttaaagattgccagaatcgaagtttgtattggaaaatgggtggtaaactggtgaccattgaagtgaaaaaaggtgaaaatgtgaaacagcgaatcaagcaacggtgggggttgtggttaacactgctggtgattgttttaggactaatcggggttggattgacccgggttaatgcgggactttatcagcagacagttgcacaagtgacccacgtgcagactaagagtcgaagcacgacgacggatgaatttgaaaataaggatgcgacagtgacacagttggtaacggtccgggtgctcaataaggcacatcgtggtcgaacttaccagatcaagaatacgtatacgcgctcgggcgcaatggatcagacgtatcacgtccgtaatcaagttttcttacggattcctagtgatcatagtagtgcagtgacgattcaggggttaaaacgagataccgccttggcgtttgtcgcgtggttagccctagcactgctcttgttaatcatgcgtttcagtggtctgatggcctttttgagtgtcgcgctcaacgctgtactattttatgccgccattcagatcgatttagctactaatggtggccacatttacctgctctttggcgtattggccgtaatcttcgccgtgctcacactgttgctagtgctcggttttagtcgtcaaatgttagtaacattgggcgcgactgtggttggcacgggactggctgtcattattagtctgatcgtctttgcggtgacccatgagcgtggtgtgacttatgaatcgatgcagtacgtgacgcaggtgccccgaccgctatttttagtcgaaacagttctcggttcactcggagcagtcatggatgaatcaacagatattgttgcttcattgtttcaattgaaaacggagcgcccggacattgcaccacgacaagtatttaagtcgggtattcaaattggccggtctattatgggacccttgatcaacgtgctatttttgattttcatggcggatactttcgcgatgactttgctctatttccgtaacggcaatagctggggttacacttttacaatgaatatgtcgttggggatggtccaaagtttgatttctggtatcggtatcgttttagcgattccagtagccagttggttagccagtcgattgatgcctaaggcggtgatggcatgaacacgattaccgttttaggattgatcttactaggattgatgacattaattggtggtaagactggagcgacggcctttttgagtttgttatttaactttggattgttgtttttagccgttgttttgatttcatggggctttccagcaatgggggtgtcgttggtcattgggacaatcatcttggccttcacgattttctttggggaggacaacgaagtggcggccaagccagcttatattgcagcattgattgttatggtcattttagtgctgattatttttcccgttgaaaattggatcatggcgcagggctttagtttagaagatagtgaagatctggaaggtatgtcgttagccattggggtctcctttattggcgtagcagtaactgaagcaattttaagtacactaggggccattgcggaagctgctattgcgattgcggctggtctgagtgaaattctggcgcagcatccgcagttgccaactaagcgactctatatcgatggtatcagtattggtaagcagattatcgggacgacttttaataccttgtttttcggcttttttggtggcttcttggcgctatttatctggtttgcgggcttacattattccttcgggagtgttatcaataataaaatatttgttgcggaagtattaatggtattattctcgttaattggcgttatcctggtagttcccgtcacgacgtgggtgatgacgattcaacatcggcaacaaattaagcacaacgattgacgatgaccgcgggatttgctacggttgagaaaacagttgggagcgttgtgatgatggaaattcgaacggcacaaccgcaagatagtgctcaaattgcaccattgattgcgatgatttaccgtgatatggaaatgccagtcttaaaaaatgttagcgaggccgacctattggcaatgttgactgagttgtatcagcgaccggccaatttagatgggttagcgcagacttttgtggcggtcatggctcacaaaatcgtcggtgtcgcgtttgggcacttagcgaagaatgaagtcgctgtaaacgatttgttgcggacgacttcaggtcatcatgcggggtttgaggcaccactggaattaggtggtgagacccggccgaatgagtggtatttaagcatgttggcagttgatccgcaagctcagggccacggagttggtagtgccttactagaagcattaccaggactcgttggtcaactgggggccacgaaactgagtttaaacgttgatgatggcaatccccgagcagctaagttataccaccggcatggttttgtcccggatggtcagctcatgattggcacacatccgtaccagcacttggttaagcctttatcataataactgaaatatcgtggtgtgtttcttagaccacggtatttttttacgtcattatggcactgaagacttttctattgagcatgacacagttagaattaaactattgaacggattaggaaggtgaacgtgccatgcagatctatttcattcgtcacggtcgaacacaatataacttagaacaccgatttcaaggtggacgagcagattccccgctggttgctagcggaatcgatggggcaaaggccgctggtgattacttaagcaccacccaattttcagcagtatatagcagtccgcagcaacgagcgctggatacggcgaaatacattgtggctgccaatcagtggcaaccgccgattcaaatcgacgatggcttgcgtgagtttgattttggtgattgggacggcaaacaggaagcggaagtacagccgcagtcctacgcccaagttatttttactaaacctgccgaataccgaccggaactagctggcggtggcgaaagttatgcggattttgtcacccgaacgacttcgacgctacatcgtttgattgatcaagttggggtagctagcacgcaaccactattaatcgtatcgcacggtctggtgacgacgatgactgtcaaggcgttaatgggtgtccccgtagcagaattacgagcaccttttgtggtcgatgggcaagttatgaagacagtgggccacggtatcgtggataatgatagcctgacagtgttatcgacgacggataatcagcattttgaactgacgacttggaatgaaaccgggtacttgaagtaaatggctgagtaataatatgaaaaactagtattgtgatgcaacgaaatattgcagacaatactagtttttttattagttacataatgacgttactaagcaagaaagtcagttgcttctagtacccgtacacaagcgtcatgcttaatgtgccgctgagcaacggaaagatatcctgattggagatcacgatgatacaagattaattcattactattttgattagcgcacagtaagtaatgattatctttgctcaggctaaagtcacgagggaatacgccttcagttttaatttgttgaattttttccaactggcgaccattatcaagaatttgataaacggtgagtgagttgtgcccgcggtttgagacatataggaagcgttcgtcagcagataaacggatggccgctgaaccattgtgtccgacatagccttctggaatgtttgaatagtcatttaaccaagtgattcgaccagtatcgtggtcgtattcagcaactgcgacacgactggcaacttcaccgagtacgtaaatataatttgatttttgagcgatggcaatttgacgaggcccaaaaccgggtttggtatcgaagtcagtgacgagcgttaactcaccattgtccgcaacatcgtaaacaaatagtttgtcgcagccaaggccacaaacaatcaagcggccatcgggtaataggcgggtaaagtgaatatgagcgtggccttgttctacttcgggaccggagccttcaataggatagttatgctgactagtaatgtgccattgattatcaagtttaaacgtgtgcacagcgttggtattgtagttggcagcaaagataatgcgacgctgtgcgtctaggtagacgtatgaggggacggtatagctcagttcattccaaaagtaacgattagtactggcgtcataagcttcgtatgcgggtgtaacacctttctgtacgagcattttagtatcaatcagttttccttcgctttgggtggtatcgatgataccaacgccaccggtattctcattcttggtcagaacagtcactaatttatggttggacttattgctgtcgaaattgaagaatgctggattatccaacttaacatatggctcaatcgatacgattttggcttcgtctgtgtctaaagttgccacgtagataccctcagattgattgttgggtgtgtaattgtcactggtgtagccaccaattaagaatttgtctagcatgattatggcttcctttcaatctactgtaaataattgtgattttgcaatggtttccggtgtcagttcttggcctagtcctgggtgatcagggaccttgaagacgccgttttctggttgatagtcgtgaatacaagttcgacgatcattttcgttaagtgcacgttgatattgctcatgaatgacgaaattagaaatagctgcctcagtctgtagtgctgctgccgtggcaatcggactgccacaaacatgaatctgtgcattgatgtcgtaaatctctgccatatcacagatttttttagcttctgagataccgccacaaaggcataaatctggctgaacaactttaatagcacgcttctcaaataattcacgaaatccccagcgtgtaaagacccgttcaccagcggcaattgggatgttgacgtgttgagcaatttccagcgtgttgtctggatttagcggactaaccggttcttcgtaataccagatgcgtaatggttccagcaactggccaatttgaattgcagcggttgtgtcagtattggcgtgcatatcgataataatatctaaatcatcaccaccagcatcacgcattgctttcacacggtcataagtagtttgcattacttgagttgtcagcggaccagttgtgtgccagttgcccccgccatcagcttgattgctgaaaataatgggatcgaatttcagtgcatcgtatccttcattcattactttacgtgtaacttcggcatagtcctcgggagtaagtagtcgttctttttcaatgtgcgctccccaattatattgtagttggcttgcatatgttctcagatggtcgttggttttaccgcctagtagttgataaattggtgtttggtagtatttccccttaatgtcccagagtgcaatatcaattgcactgatggcagcatttacggctacgccaccagcaaggccccagtaggtcgtagtttgtaattgatgccagattttttcaatattcaagggattttccccaataatgacatgacaaaaatcttgtagcattcctaaaccaccacgccagcctttaccgtaagctagtccagcttcaccgaaaccggagataccagtatctgtatttaatcgaaggacaattggcgaccaatcttccgttgaccccttagagttaccactgaaactaggatcagtacttgggacttgcataacatcggcactgataattttcatgaaaaagcctcctatgaaattagctgatttgtaaagcgctttcaatgattagtatagatactttgtgaatcttgttacagagattaaacggacgtcaggggaactaatagttactgtaatatcgaaaaagacatcgttagaataaagttatcgatatagtctaggttgaaaatgaaggaataatggctgtgagaaatctttttttgaaagtaaaagtgaaaataatcacaaaaaatgagggtgatttgaatgccaattttaattattgcgctaggggttgcaattctagtttttctaattgttaaattgaaactgaacacatttgtttcgttggtgactgtttcgttagttgttggactattgttaggaatacccattggaaaaattaatacagttattgaagatggcattggtagtcagcttggtagtttagccattgtttttggattgggtgcaatgctgggacgtttaattgcagattctggagcggggttccggattgccatggtactaagtagaaaatttggtcgacggtgcattgaatgggcagtagtgcttgcttcattcattattggcctggcgttgttcttcgaagtcggtctggttgttctattaccgattatcttcgtgattgccaatgagttaaatattgccatgttgtatttagcgattcctatggccgctgctttgaatgttgcgcatgccttcttgccaccgcatccggcgcctgttgcaattgcttcaatttttaatgtgcctttaggccatgtgttagcattaggtgtactagcagcaataccaacggtcatcgtcgctggaccactgtacaatcatttcttgcatcgtatttatccaactgtttatcgagtgaaaagtgttagtaaagttatgggacagtatcattctttcgagttagcggagacacctaattttggtgttagtgtcgttacagcaacaatgccaatcatcttaattgttgttgcaacgatttcaaagtacctgttgccatcgagcagtgcgattagccgaattgtccagtttattggttcaccggataatgccatgttaattgcgctattgtgtgcagtttatctgttaggattaaagcgacaggttccgatgaagaaaattgggaagtcaatgcgaactgctattgagcaaattgcaatgatgctcttcattattggtggtggtggggcatttaagcaagttttggttactggcggtgttgcgaaatatgtggccacactatttgtttcagtccattggtcaccaataatcgcggcatgggtaatgactgcggtactgagagcttgtattggttccacaacggtagccgcgctgaccggagcagggctggcggtaccactgctgcagtcttctagtgttaatgccgctttgatggttttagcagttggtgcgggatcagtattttgtgaccatgtcaacggtgctggtttttggatgattaagcaatactttgatttgagtttgaaagagacactgttaacttggacgccactgactatgttaatgtcagtggttggtctcggatgtgtgctcgtgttatcattattcttttagagtcagtaattatgaaccttaagtaagtcgattgtgtctcggatagacagcaatcgactttttgattttgtatgtccccagaatgagcaataattctggaagcaaaggtagaccagaaaccgcactataaatactgctttgggaaatattagaatcctggtagcttgagaagcttcacaattaatgataaatcgggttagtgtcgctgacccaagtagctccatatttggaataatgcagagcattgagcttgatttctcattcaagattagtaaaactcttaaatacggatatgcaaatgtgggtgtttttggtgttgtaaggcgacgttaagaatggcagatctttaaccgtggctaaatcctgaaataatgctagcctcaaaagtggggtgtgtgcatagttacagactgcaaagcattatatgttgttggtacatcattattaatgttaataagatatgtcgatggtatgtcgtaaacggcctgagagctaataaaaccccacctagcatgtaattgttaggtggggctaatttgatgactgaagttaagcgttaaacaacacctaacaactgccatacgggaacacagcacaacagtccaacgatattaatgaccatgtaacctagggatgaagaagccaatgatcctttcgaagccattgaattattaacggcagcagatccaattagaaatggggcgtccatatacgataacaaccagatattgacgctagttgtaacaataaatacaatcacggccggattgaaaggtgttgtttggaaaaatggcaataatgcaatgataattaaggtcccagtggaaatgagcgagacgaccacaaacttgcagatatagatgatgattggtaaaacaattacggtaatccaaatattacctaaaatcgggctgattactggctttaggatgacccgcaaccaagaagttaagccaacagtctgcatcacatttcctaaggccatgacggtaccgataaagatgattgtgttccaacttaaacgtgtcttgaagtcatttggtgtcaaaactttggttgcaacgagcacgctgacacctactaatgccgtgacggcagctgggatattgactgtggattccaaaatccagaagacgattgcaacaagaataacggcaccggtaattttttcatctcgtgacattggtcccaaatctgtgagttgttgattgatgaacgacttggaaaccgtttgatcatttcgtggcttgaacagccaacgcaataagaagtagccaccaactagcgcaataatcgtccagggcagcatcattacgaaccagtttccccaagttaatactgactgaaatttattgggcaacagtcctttgaaagcataattttgagcagtagcacttagaaaactggcttccattaccaggaatccccagatagcggctaagaatagtcccgaactaccttgactcatcggtttgtatcctagcgcattactgattccttgcgcgattggtgtactcattgcagttttggggtgtgcacttggaatcattggtgaaataattgttccggcagtaaagagtgctaaagtttgaccactgaagtttgcaggaaaccaggacatgatttttagtgcaattctattaattagaccagttttggttgctgctgcgccaaggcccaatccaccaataataatccacatagtggtggttgaaaaaatattaaaggcggttggaaagtcggtggcgcctaaaataacccatgacgaaagcattaacaaaccagttgcaaaacttggaataacgttaaaaatccaaaaaatattggcagtaactagcgaggccaaaacaatcatgcctgcatgtgtaagtccatgcggggttgggataacaaatgtgatgactaatcccaaagcgatgccgattaaccctgcaatccatttagtatgtttcataatgcttacctaccttagttggcaaaaacgtcagggttaactggaaattgtggtaacttaccatttgaaaagtcgataattgcttgggcagcaccgatgccaagtgcggcgttagcctccttggttgttccagcaatatggcttgtcaaaacggtatttttgctggtgaataatggattatctggcgcgggtggttcaggattgaatgaatcaattgctgcccctgcaagttgatcatgatttagtgcatctgcaagatctggttcgttgataatgccaccacgtgccgagttaatgatgtaggcagtcggtttcatgagtaataattctttggttgtaatcatattcttggtttcaggtgttaatggcatattgaccgataagaaatcagctaaggggtagatatcattcagttcagcatagagctttaccggtgaattcttgatgtaaggatcatagccgataacgtgcatgccaaatgcttcagctaaggtcactaattgctgaccgattttacctaaccccagaattgctagtgtcttaccgcgaagttcatgcccattaagctcataagtagtagaaaatccgggaagtgaggtaccgcttagctcagccttgtgtgttcgtaaagcattatcagatttattgatgcggcgactgagcagtaacatggtggtcatcacatattcagcgacagaaaatgcgttggctccgttaactttagcaactaacacatgttgcttggtagcggcatcgacatcaacgttattaatacctgtcccattacgagaaatgatcttcaattctttaccggcagcaattacatcggctgaaagctttgatgaccgcatgatcacggcataggcgtccttaattgcagctttcatagattcattgtcagtgtcaggagcgacttgaacatcaaagtggtttttagtcagtaattcaatacccgcatcgtcaattttttcacttaacaaaacttttttcatgattttttcctcccagatgtaattcattaagttaaccgcttacagttatattttagtgattaatttcactaaagcacagttactaaatggacagctggtgaacaaaatcgaccattgcatcgatgacgcgcgacaatggtcaattttgttataaaagatatgtgagtaattgatgtaagaccaggttatggttgttctttttgtaaaacagtgttgaagcgtatgtcgtgttaacgtcatcggcaattggtaggaacctaattagtgggtttttttgttgttctagtgtcaagaagggacttggatagaagccgattccttggtttgacgcaattagcatgtcgcgtaattcgagtgatgaaacgcgattgatttgatgttctgaaaaagtctgattgaacttttcaaaaaagattttcttcaagtagagtgaagcgtacgggctataatagagtacctctaagtctttgaggtcgccaagtgcaactgagtcagcttgtgcaagtttgtttagagaactgataccaactactaggtctcccttagctaattcaattcttgataaactagggtcggtcatatcattctgcatataatagtatggtgagacggctaggtctaatatgcccgtgtgaacaagttgctgtagtctttgaccactttcttgacgaaattcaagcttaattgttggatcggatttgagcaatggaatgagcattttttgggttgcaatttcttgattggaagatgaaaacccgattttaagccgcttttccttggtttgttgttctgattgaatccgaatcagttcatcgttgtaagtattaacgatatcctctgcagcaatgacaaattttgtaccggttggtgtcaggtcagtattgttatgacggcgaataaacaatttaacaccaagctcattttcaagttgatccatttgctttgagacggctcgtggagataagaatagcaattcagctgctgctttaaaactgccattctttgcaataaccaaaaatgtttttaatcgattaatttccataatgacttcctcctcgggctgaatattagtggcaagtgaacgtttggttcagcaagcgaacaatttggtactgttataattattgaccggaccatataataaagtcaataaatgattgttacagaaatcacaaaagaaggttattgaaatgagtattccaaaaattgttgatatgttggtttatccagttgctggttacgatagtatgctattgaacttaagtggcgcacatggtgcttttttcacccgtaatgtcgttatcttaaaagcagataacggtcaaattggggccggtgaagttccaggtggagaaaagattaccgagactttaaatgcggctaaagcgttagttatcaatgagtcgattggtaattataaatcagttttacaaaaaatcagacagaagttttcctatttagatcaagggggccgtggtaaccagacttttgatcaacgaattatggttcatgcgctgactgcaattgaaaccgcttttttagatttgctcggcaaacattttcacgttccggtagcagctcttttgggcgatggtcaacagcgcgaaaaagttggtgttttaggttatctattctgggttggtaatagtcagaagaccgacttaccgtatttacaagatgatgataattcgagtcaatggggaaagttacgtcgacaaccggtgatggatgcggatgctttagttaagcttgctaaagctgcatacgataagtatgggtttaagaccttcaaacttaagggtggtgtttttgacggtgaaaccgaagttgcggcaattaaggctttgcatcaagctttcccagacgcaaaattagatcttgatccaaatggtgcctggtcactcaaagaagccttacactacgctgatgaacttaaaggcattttgcactatattgaggatccttgcggtgcagaagcaggcttctctggccgtgaaattttatctgagtttcagcgcatcacgcacatgccgactgcgacaaatatggtagatactgattggcggcagatgtcacatgccattgcactgaacgccgtatcgattccgctagccgatccacatttttggacgatggaaggcgctgtacgggtcgcacagttatgtcatgaatttgatcttaactggggtgttcattcaaataatcattttgatatttcattggccatggttgcaaacgctgctgcggcagcgcctggaaatgtttatgatgttgacactcattggatttggcaggatggtcaaaacttaactcgtcatccttatgaaattaaggatggtcagttgacggtcccacggacaaacgaaggattaggtattgaggtcgatatggatgcaatcgaaaaagcacatcaactctatgtggataataatttaggcgctcgtgacgatgcgaaggctatgcaatatctgattccaaattggcaatttgatgctaaacgtccagcattagttcgctagatgcttgttcgatgtgttttataagaatcaagttgtgattaacaaaaacgatcgtcttactttaacttagtaagcgatcgtttttgttaatcattattgcgtatcgatatttgtagggtaactggtaattcagttttaccacagcccactaaaaatactagctgccgccacgccccaataatattcggaggtgcgggcggtttgggtgtagagtgtgttaattgcttggagtggttggtgcatgtgatcacgcatgacgcgcattgccatgccgttaactttagtggcaattaataaatagttaccgttcttgtcaagttccatagcatagcgaagtaagtcagcacgaacttgtgcgtcttgtttaacttcaggatcattataggcaacgtcgatttgttgcatcaaacgcttggttttatcattttttgttcacgttaatccccccatgccaagagtatagcacaagtctcagacttaaatgttagcttaacgcgaaaccgcccgcatttcggatagtaaaatgcggggcggtttttatcagtccgcttgttttttacatgtgatttctgcaacgtgatactggtgatttttgatatgccctggtcgctaaattaacgcggccgccatcacttgggccacatcttggctttgccaatactgatccactaatggtgcgaaagcgtggttcaagccctgatactgaataaacgtggtcgcagtatcggcagcggccaggcgttgtgcataagcccaagcttgtggtcggaagggatcaaactcgccgaccatgatcgtggttggtggtgtcattgtgaagttttcctggtgtagcggtgagatgagtggagaatgtgaatcaaagttctctggaacataataatccgtcatgatgctgtcaagttgccgaaagaggtcgtgatagttggtgagaatggcacgctgtgagtcaataatcggaaaggcggccaaatcccagagtggaccggcgtggtcagcatttggggcggtaactgggtacaacagcagttgttgattgatacgattgctaccgagttgttgattcagatttgttgcagccatgatgacgttagcgccagccgaatcgccagcaacggtaatcattgtttcagcgtcacgttgttccaaatattggaaaatcgcgagcccgtctaaaataccagcgggtgctggtgcttctggcgctaagctgtaatcgacattaagaatctcgcagtgacttttagctgcgaccagctttaaaaggaccgtattattgccgggaacaccgccataaaaggcaccaccgtggaagtagaccagtactgtgtgattaatgacattttgtggtgtcagccattcaacgctgaccgtgcgattcagagccgtaatatttcgactttgaactgtaaccgcatcaccaacagggtccgcgatggcgggggttaaactaccactgcggagcgccgctagatcattttcaaggatggctggttgtttgaaggccgttagtgtttgaaggacgtgcgggtcaaattgttcaccggcgatgtcgttgttaaatggtttaacaattttgacgacgccgttgacggttgtttgaatcgaattaattgttggcatcatattcaacatcctccttaggttcaactttagccgctgcgtcggccttgttggcttgtaattttttttcgtctaaccgatagaattgcatcatgaaaatcatcgcggctaataaaataatcggcatccaaataaaagcgagattaataaatgtaatggttcgtccggactgtacagctgccttggcattgaattgtccccatgcgagaaattgaccggctagaaaaccgccaattcccattcctaatttggcgccaatcattggtacggcagataagaatccggtttcatttaggcccagtactttcgttgagtagtcaacggtatctgatagcatcgcgaagacaatcgtgaacgtgatccccatcgcaatcaagaaaatgacggagccagcaattagtaggctcacactacgcatcttttcagcgattggcagcagtagttggccgataacgcccagtacgagtgaaaactgcaaaacgttacggttcttaaagcgttgtgataggaatggtacggacaggttcccgatgacggaaacaaagccaatccccaggaaaattggcgctaattcaggccgaccgtagacgtatttgataaagaagatcgctgaatttccccgtagcatccagaaggtttgtagcagaatgaacgagcaggctaataatagccatggtttgttgctagccgcacccttcaagctttgccagattgagagtgattcggctgactcagtggtaccgtctggattttgtgcaccgttagtttccttgagattgagaaaagcaaagatgaagagtcccatgataacgaggcctaagataatagcccagagggtgaaacctttcgactgattgcctttgccgagtaatttaaccattggcaaagtgatggccgccactgcactggtcccgatggttgtcatgaccatccgagcactcgctaacttggtccgctcaacgctatcatcagtcaagcttggtaaaatcgaagtaatgggcgtgttggcaccagaataaatcaggctaaagaaagtgtaagtgattgaaatgtagacgagtcgcattgtggtattgccgccaaatgatggaatcatgaatagcgacatggccagcaaccctaacggaatgccaaaccacacaaagtaggggcgcgattgtccatacttcgtgtgtgtatgatcaatcaaataaccataaatcaatgcatcaaacgcatcaatgaagcgcacgacgaagaacagcattcctgcaaaagcagctgagatgcccgcgaccgttgtgtaatagaacagtaagtaagtgctgaccatttgccaaataatattaccggccatgtcagtggaaccgtatgcaattcggcgtttccaagtttgaaaaattgacattataaatccccccaaacgaattaaatttaaactaacaatgataattaaccccttttatcaacataattatatttccaaattaggtgaattatcaaagataggcgatagtttggctggttaataatcgaaaggtgggtgcatcttttgtacaaacacgactgatgcctgttttgtagcgctggttgggagaaagccaaacaagcaaaaaacacccccagcaatggccaatcaaattagctgttgctgggggtgttaatggttaaagacgcgtgtcgcggatgtcaccaattgttaacagaaatagaattgaaaatagccttgtcggtcagttctgttttgaccattaatcaatggttggtttcagagctagtgctttagcggcttcttcactgtcatcaaagtgatgcttagtccggccgatgatttgataatcttcgtggcctttaccagcgattaaaacaacgtcgccgggttgtgctgcttcaatggccttggcgatggcaacgtggcggtcttcgtagacgggcacgtcggcgtttggcacgccggcaaccatgtcatttagaatcatggttgggtcttccgtccgaggattgtcagaagtaaagattggcttagtactgtgttcgacagcaattttagccatctttggccgtttcgtcttgtcgcgatcaccaccacagccgacgacgcaataaatatccttagtcgcgaaatcttgaatcgtttctagggcattcaataagccgtccggagtgtgtgagtagtcaacgatgacactgacacccgtgtgggaaggaacggattggaagcggcccttaacgccggtaaccttctccagtgacttaatgatttggtcttcggggatgccactagcgtaagctgcggcgaaggccgccagcatgttgtacacgttgaactggccaatcagttgcatcgtcacgtgggttacgtggccgaagacggagaggtcaaattcagtcccgtggctcttgatttcaacattttgtgcgttgatcatggcatctggtttgagtccaaatgttagtacgtgcgctgccgtatactgttcaaattcacggccaacgggatcatcggtgttcagaacagcgaccttattagttccgtcggcgctgtacttattgcccagttgtgcaaagagcatggccttggcttccgtgtacttagccattgttttgtggaaatccaaatggtcttgcgtcaagttcgtgaaaacggcgatgtcgtaatcaatcccccagacccgtccgagtacgagggcaattgaagaaacttccatggcgacagtttcaacaccggcatcccgcatggccgctagagtccgttgcgttgtgatggcgtcgggggtggtgttggcagttggcagtttttcatccttgattttgcgatacatggtcccaatcaggccggtggcttgctgctgatcacgatagatttgttcgatcaggtgggtgacagtggtcttaccattggtacccgtcaccccaatcatccgcatcttttgactaggcgcaccgtagaaaacgtcggcaagaattgccatagcgcgttcggtgttttcaacgtagatgaccggtacgttgacgtctaaaggttttgacgccacgatgatcttggccccttttccgatggcctgatcaacgaggtcgtgaccgtcgacgtgataaccaacgacggcaataaacatggcgccgggctgaacttcgcgggtatcctgcgtcagcatggtgacatcaaagtccgtggtcaaggcgggctgaacctgcttgaattttaaactattaattaattgacttgcttgcataatattagcgtccttttcaataaagttactgtttctagaatacatgcaaaccggataattgtcaccccaaatgagaattgaaattatgcttgtaatcgctcggtacatggtgtgctgctggttgaacgtgccatctccaggccaatctaggtcaacaaaaaagcccggcaattaagccggacttgcagggatggttattcgattcctaagaactcatcatgtaaggcgttcatggccgcttttaaatcggcttccttaacgagcacccagatggtcgtataactatcggtcgattgtaaaatatcgatatgttgtgcagctattgccgagacgatccgagcagtgacgccgggtgtcccagtgataccagcaccgacaacggaaactttagcacagttcgcaattgactgacaatggacgtgcgcgtcagtcagtagctgcttggcaacgtccgcgtcaccatcaaccaggttgaagacaacttggtgtggtgtaatgttaataaagtcaacactcaaaccgtgctgtgccatcaattggaaaatggcacttgaacttaacgtatcggtaggaacagtaaattgcgtcaaatcagtttggtgtgcaatccctgtcacggtacgataatgttcgatttgggtcgtggtccggtcagtgactaaagtccctaattcgtcgggttcctgataagttgaccgaatccgcatcggcacgtgagcttgttctgcaatttcaacagcacgcggatgaatgaccttagcaccttcatgggccatgttagcaagttcttcgtagctgatggccttaatgaagcgggcgtgggtgacgagtcgtggatcggcagtcatcatgccgttgacatcagtaaaaatatcaacacgttttgcttttaaagcggcgccgaggatggctgctgatgtatcggaaccaccacggccaatcgtagtaatgtggccgctctcagtagcaccttgaaaaccagttacgactaccacgtcggcgtcaataaaggcgtccgtgattggtttcggatcaacgcggagaatcttcgcattttgaaaatcgtcgttagtcacgatgccagcatcatgaccagtcatggccgtgacgtttaggccttgcttacgcgctaactcggtaaagacagcggtcgagatggtttccccaactgagaccaacatgtcgagttctcgattggttaagcgggagtgctcggccccaactaatccgagtaatgagtcggtggcgtaaggggcacctttccggccaattgctgagacaacgacaatgactttatcgccctgatcgacggcgtattgaacgtgctttaaagcttgaatacgggcggcttcgtccttgactgacgtgccaccgaacttttgaacaataatttccattgatctaaaactcctcgactttttccgcaacggcgttagcttcggggctatccatcaagtggtcagattcgacatagagtcggtgccacatcatgaaggtgagggccgtccagagtttccgagaattatcccgaacgccggccttgtggtcatctaagagtttcaagaagtagtccttattgaagtattggtcagtttgcgaatcgttaatgatctgcttagcccagtcgtacatttcatctttgagccagaaccgaattggtactgggaaaccaagctttttacggtgaaggacgtgcgctggcacgatgtcttcgaccgctttacgaagaatgtactttgttgtgccgtgactaattcgaagatcagctggaatttcggctgctaagttatacacttcacggtcaacaaacggggtccgcagttccaaactgtgcgccatcgttgtccggtcggcgttatgcaacaagtcaccgtttaaccacgtgtgcatatcgatgaattgcatccgactgattggatcatagtcgacggattcatcatagagcggttgcgtgatggactggaacggatggttctgattgtaattcttgaagaaggcttgtttttcttgttcaccaaagataaaggcgttcccaacatagcgattttctaatggggtggtccctcgtagtaagaatgaccgaccacgcattccctctggcatcatgagtgcgatacgcttcaaggcaccattaatcggtttcgtgtagcggaacggtttcaatgattctggttcatgatagatggtgtagccaccgaagagttcgtcagcgccttcaccagtcaaacaaaccttaacgtgtttgaccgcttctttggctaagaaatactgcggcacagcggccgggtcagccaacggatcatccatgctccacacaaagtgcgggaaggccttcatgaaggcttcaggcgtaatcgtcatgctgtaattcttaacaccaagcttttcagcggtctcttgagcaacgtcaagttcactatacccttcacgttcgaaaccaacggagatcgtttcaaggcttgggttgaagttttttgcaatcgcgacgatgattgatgagtcgatcccgcctgaaaggaaagaaccaactggtacatcggaacgcatgtgaatcttaacggagtcaattaaggcatctttgatttttttggcatactcgtcttcagaacgttggaccggatggaattcacggtgataataccgatcgatccgtggcgcagaccccaactttttcgtcaaggagcaaccaggggcgagcattttgatttcttttgtgagtgtttctggttcaggaacaaattggaacgtcatgtaatcttgtaaggcatttttatcgaaggttttatcctttaaaatcttgtaaatggccttgctttcagaagcataatagaagtcatcaccactgatagcgtaatagaacggcttgatcccgaactgatcgcgcgcggcaaataacgttttttcttgtttatcccagatgacgaaagcaaacattccccgtaagtacttcgttgcgtcagcgtggtacttggcgtacatcgcaagaattacttcagaatcggagcttgttttgaattcgtagccttcttgtttgagttgttcacgtaattcaacgtagttataaatttccccgttaaatgtcatccagtaacgttcattatcataagatagtggttggtgaccaccggctaagtcaatgatacttaagcgccgaaaacccatggtaatgttgtcatcagcaaaataaccgtcatcatcgggtccccgatggacaatcattttagtcatttcgtggatggtctgatcgtaagctgcgttatccgctttagtccgatcagttaagcaaccagcaaaaccgcacatgtctgttcatctctcaatctttaaagtttagacagttcttatctactatatgtgtacagatggttcgttgttaatttacccgtttcattcacggatgtaaagcactctgaacaattataacggtttcttaccaatgtctgtcataattatgcttgacaatccgcgacgtacactttgactattatacttgctttaattcataagataaagcggagcgcgcagatggaacgctttcattgataaaaatttcatattgtgcgaaacgtccaattagttggatgccggttccttggcggagcggatttctactgactatttggttagttcgaattgaccgttattgacatgacacatttaggtgctgattgctggccttatggctgaaaaagtcacagaaaaatcccgcaaactcatgcacaaatttgcgggacgtttaagtgggaatattaaattagatgtgcccttgcgctctaagcccagccaactaggcgcaatacggccatggcaacgatgcctgttataacgacggctagtaaacttttggtgagcactcctgcaagaatggcaggaattgaggcataaatatttgggagattaaattctggccagtgtcccgcatggtaggtgagcagactttcaacaaaaatagcggtcataatggcaattggcacaaatgataaaaagctgattagccattgggggactgacagatttttaatgatggcaaacgggacaatgcgtgatagccaagtcacgaggccgcagagtaagatggtcacaaaaatgtaagtactcatttatggtccaccaccattccaaaaccgcaaccgagtagcgtcgcaaagatcaaagccaagttgcccgaacccaacgcatgagaaaatacatggcgagggccacaaatagtacgacccacaactgggtcggcaatgatttactgcgatccgtgatgatctgcaagtaaagtaaaccaatgaacataccaacaacggcgaaatccaagccgaactggttagggtcagtaatcaagttacctaaaaggcaccccaccactgtcgcggctgcccaaaccaagtaagccacaatgttagcagcgtgtaaccaactcgtttttaattgttgattggtctgattgagcttgttcatgctgagcgcgaaggtctcatcagttagtaacgatcccagtccgatattttgcaataacgactcttttttgaaatattgagcgactgacatgctcattaaaatcatgcgtgaattaatcaaaaaagtggataagacgattgccgaaatcggactacctgctaggagcatactgacgataataaattgtgcggaaccagcatagacgattagtgacatgagtagaacggcccaaactgataggtgactcgtgttggcgacaatgcccattgctaggccaacgccaatgtatccaaagacggtgggaatgacatctttgatgcccgcgcgaaaggttaaactagaatccataaatgtacgacctccgattcaataagtatgcgttaaccaacactaaatgggattatctgacaattagtgtggttcatgaaacaggataactatgtaggttaagtttgagtgcgtgttatgatgaaaaagcacgcttgatatccgccaatagtaaggtgacgaatgaggcaaaggcgggttaagaattagtttactactttcggtgaaaataatgaagaaaattatcattgacttttaatcgtgacgttacgaaattgttgcttgcatttcaaaagctgggggcgtaacataatcacattgattttttgaaaggacaaatggtgagagaaaatgactctggaacaattagcagcccatagcggggtcgctgctgataaaatcgtcgcctataccaatgccgggttattaccttgcaaggatgtcaacgcgcattttagcgccgatgatgaatattggctagatatggtcaattgcttcttagaaaatggctcatccgtcgaggatttgaaagatttaatgccactttgtgaacagtgtgcagctcaataaataagtaagttaagacaatcgcaccgattctactagaattggtgcgattgtttttttattactcatcgttattaaacaatcatgattaaaacgtgccgattcttaagttcaaaagcagccagcttagacccgctgggaaaagttaaaacggcgctgacgacggttgataagggtgtcaagattacgaacggggcaacaagtttgacgaataagctgaaacagttgaaagtcaccgtaaccagtgattatcaggaatatcagcaattgtcagatgatgttaaagcacagttaaaggtgaagaacggcaactattcagcggacgtgctcaaacgttgcgcagccatcaactgggataaaaagccatatttgaaaccgttgaaggctaaggtaaaacagttattgactgcggcaaaaaaggccaagacgaatatgaaagttagtgcggctgaagcgaaacgagcagcggcgttacgtcggaagattgctgccgctaaaaacaagtggaacatggccgcattagacgatgtgcccgattggttcattttggcactttttgccgacgatagtgatgtggatgatgctgctgaagaattagatgacgaatatgccgatcaggccgacgataatgacgattattcggatcgggatgagcaaacgactgattcgaatgatgacacgaacgacaccgacgcggattcggctgatgacgattggagtgatcaagatacggattcgaatgacgataccgacgatgattccgatactaatagcgatgctgacagcgattcggattactcagaagatgatgacgatgaagattcgaatcgtgatgacgccgatgacagcgaaacccaatccgatgacgattacgatgatgatactgatagtgagtctgatgacgacgattatgatactgatgatcaatatgacgatgatgatgactacgatgacgccgagagcctactcaacccggcacctgttcaaccgtcagtggccgaccggctgtttgcgtcggctagttgttagtcgttcagcggtaaaatcaccaaagatcgtctgacagttttaataatgcagttatgggcgatataaaaacaagcgtccgcgttgattagatcaacgcggacgcttgttttcttacgtggagtttgttgccgaacatgtctgagtaccagttgctcacgggcaagcctttatcttagcgttgattaaggctgatgtttaaagcgagcgtaaatcgagctcattgttgaaaatccgatgactattaagaccatgatttgtaatacgccagtgggttgctgaatttgcctgacgataatgtaagtcagaatagccaagttgatcagccaaccaaatcgtcttatttgcttaattataaaatttttagggtctgttttactaagcatataaagtaaaagggcgatgatgatccaaaacaatcctgatgttgagtgatagtacacgtaatcattcctttagacgtctgactttctaatgacatcgtaacaatcaacttggtacgtgataatcgtatcatttgctcgaaagcatcaaaatcatgttttagtaaagatagtgtacattttcagaaaagaaacgtgaattttttgtaaaccaccggcataattaaccggcgcatcgattttgaataagtgtggtcttgacgctggggcgccggcgctagttttggcaagacgttagtgaaagggggggacaagccatgatgatctttagacaacaaagaccccggcatgccggggtcttgtcagctatttttaattgttagttcaagttatttgctagctttaacggttttaagcatgctctgaatggcattggcttgatattgagcagccgctgctttttgaacttttgcgagttgcgctttgctcgttgtcgggttcttgaccattgcggccttgacctgattagtcacgtagactttagcacgcgcttttaatgtcgcttgctgttgcttcatcaatttactgaattgtttagcttgggttgtgctaagtacgacccagttcttattgatatagaagtagttggttcgcttgatcaactgtttgtcattgttggctaagccaaaccagaacttcatggcgttactcttataagtccaccgtgtcgtcttagtaactaacttaggtgtcgcggtcgtcgtcttaacttggttagcagtcttgacgctggctgtcgtatggctaacttttttctgattagtggtctttttataaatatagacccggtgcttgtcagcggtacccacactttgatagagcaataaatcaagttgcttgctactaccagcagactttaatgattgcgtggtggtcgtcgttgttttgaccatcccgtaatgttgaccatcattcttggagacgaagacgatcgaggtcactaagagtgccgcaaagataacggataggctgattcgtaatgtgttttggtgaacgtagataaatgataagaagagcgcgattgcgctaacaacgagtagtacgagaatcattagtcgttcacctccttagtgttcattactggcttaacggaatgctgcttgcctttcatgaagaacgcgacgacgagcccgacaactgagaagcccacggcaacccagaaagccgcgtggtaaccatttaaggttgcgttgaaatagctgttctgataaccaagtggattgctcttaatcaagctatgagctggttttgtggcgtccgtaacgtttgataagacggaagtcaagatggcagtcccaatggaactagcgatttgacgcgtcgtgttgttaacggcagtcccatgacccattagttcaacgggaagggcgttcatcccagcggtagttgccggcatcatgaccatggcaatcccaaacatccgaacggcatagagaaccacgatgtaaaccgttgcggtattacgagtaatgaaggcaaatggaatggtcccgattgtcagtaaaaacatccctaaaattgccaagcgtttggcaccaaaacggtcaaaggcccggccggtaattggactcataacccccatcattagggcaccagctaatagtgatagcccagattcaaaggcggagaaaccatgaataatttgcaggtaaagtggaataaccatttcggcccctaccatggccatgttagcaactgagctcaaaatagctgcaattgtgaactcggcatgcttgaagacccgtaattggaggaatggattttccatcgtcaattgacgccaaataaaaccaatgatgaagataacaccaataattaaagttgagagaaccacggttgacgtccagccattgtcaccaacggatgaaaagccgtatagtaagctcccaaaaccaatggtagaaagtaccaaggatgcaaagtctaattttggcttagacgtttccaagacgttggccatgaagaagaagccagcgattagaacgattgcgacgattggaacgatcaaaccaaataaatcacgccatgataagttgtcgataacccacccagataaggttggaccgatggctggggccaaaccgataacaattccggcagtccccatggcagccccacgcttatcagcagggaagatagatagcataatcgtttgaagtaatggcatggtgaccccgaccccaacggcttggatcaaacgcccagccaataagaagccaaagtttggtgctgtccaacagataatagtacccacttcgaaaatggccattgcggaaagatataaccatttagtggaaatccgtgaacttaaccacgcactaacgggaatcataatcccgttgactaacataaacccggttgttaaccattgcacggtcgacgttgtgatgtcgaaatctttcatcaacgttgggaaggcagtggttaaaatcgtttgattaagaacggtacaaaaagtaccaactaataaaactgcaatgagcaagccacggttataaggcttcccatgcgtatcaacaggagttgacaagtaaatcccttctctctaaaaaagtacgttgtctaatataatcggatttatcgactttgtcaacaaacttgacattaatattaaaaataatatactgagtattgaaaatgttagaaaagaggttgacccgtggataagcaagaagacggtgtattttttaagaaatttaaagaacagctgggtaagcatcaattcacaatcggaattagcgatttggcgaagatgaccggcgtctctcagacacagctacgttactgggaacagaaaaattatattcatagtcttaaagtgagtgagaagaataccacgcatcgttattcgtatggtatgctgatgcgtgttcattttatcaagatgatgttagacgagggttttacactggcagcggctgtcgagcgggccgatgggtataataaccaaatggaaatgatgcgcatctttatgatgacggcttttcaaggaatcgaagaacgggatggtcaccacatggtcaagttgggatattttgacgaagcgaagacacaacagctttattgttatattcaagatgagacgccacattatcgactttatcccgttaagtcagagcgctagcaaccttcagcttgtgtaaccgattaattaatgttaaatttaagttggtaaatgtcggtaagtcacttgggcatttaagtttcccgttcgtcaaccgatcttatggctgggttgaccgttgtcatgttggtcgtgttttgaagtttaactttgcaaaaggatttacaacggagcgcgaataagcgctgagagatgcctagctagaactaggtagtaatcgtgcataaaacaacgtgtaattgaaactagtagtagtcttcaatcgcccggtgatgatatttaccagaggtcccaagtgctgcgggaaagcttggggcttttttgtactttcgtacgttaaaacgtaatctatcagtgtggttatcaacaaaaaagagaccgagtatcaactcaatctctttaaataatctataagtacgcgtggtgcttgtctttcatttagtattaattctacttctatatgaaataatcacgagtagcgcgcgttaattaagtaggaattgttaagatgtcgcagtttgagcaaacttggcggctaaccattcattccatggtagtgctggattaccactagtaaagtattgttgatcgagtcgatcaatcaagttgacgtaggcggtaaatgaaaaactaacggtgtcactcaagcgctgagccttggtcatgtagcggccgtaagtaaggtgttcattgatgtctgtcatatagctggcaacatcatagttggacatcatttcaaggttgttagcgtcaaaaagtggtaagtagaatgcggcaaagtcttcaactgccttgtgctgcaaagaactatccaattgcgtaattgataattgagcatcatcattcacgatgcggttcctccttagttgaacaagcacgtttctaaattagtaaccaaattggttattttgcgctacaattaattatgtcacgattaggcaattatttcaaagctttgtcgttattagagactaggactggtgtctcaattgtagtaagatgttagaattatattagagagaatcagaagtaactatttagttgaggtgaagaatattcatgacccccatgaaggaagattacttaaaaattattttcgagcttggtggtacgaaaaaaaaggtgtcgaataagcaaattgccttaagtttagacatcgcggccggctctgtaacggagatggtcggtaaattagttcaggaaggcttggctaagcataccccgtatgctgggatttcgttaacaaagaaaggcattcgctacgctgaaacgttagttcgcaagcaccgaatctgggaagatttcttagttgataaattggattatgatttgccagacgtgcatacggaagcggaagtgctggagcatgtgaccagtgaacgactagtggattctttggaagcctttttaggcaatccgacgcattgcccgcatggtggcgcgattcccgataaggatggtcattatcaggaagacagtcatgtgagtttagcagatacgcaggatggcacaacggttacgattgagcgatttattgataatcatgatttattagtttatttgcatgatacaccgctcaagattggacagcaggtcacggttttaaagcacgatccatttgaaggtcctgttaccgtttccattcagaaaacgggcgaggaaatcccagttagctataaagcggcgcacaatgtctttgtaaagtaagcatgcggcacctatttccgaacaaacctgttaattgttagttagttattctgtttcatttatcatcacataaacatttcatggaaatcatggtgtttggctaccctttttagaaacaatatgctacaattgttcttgtagcttggttaggtaattttggtcagatcgtttcaataaactatccccatttgtaccgaatcatgatttacattattttatacgtgcaaaatgcactaggaggattttttattatggaacacggaacagttaaatggttcaacgctgataagggttttggttttatcactcgcgaaaacggtagcgatgtattcgtacatttctcagctatccaagaagacggcttcaagagtcttgatgaaggccaagctgtaaacttcgacgttgaagaaagcgatcgtggcccacaagcagttaacgttacaaaagcataattaacagcttaaatggcttaaaccggtgatgagaattaattctcatcaccggtttttttgtcgttttgcagcggatgcttaattatcgtaaataaggctttactaacagccagacattggctaaagtaagaatcattagagaatgtaattctgattattaaagggtgggatgacagtgacaaccgatgagatgattattgcgacttgcttgaaggctggtaaaatcatggtcgagaatggttcggagatttcgcgagtagatgatacgatgatgcggattgctcagaatgcgggggttgttgctgccaatacctacgtgacgattacgggtgtcatgatgtcgattcaaggacgtaatgcaacgcagattgccgcggttaaccagcgaacgatcgatcttgaaaaagtggcacaggtcaatcagttatcccgtgaatttgcggctacgaccattgatttaccaactttatatcaacggcttaatcagttagatgcagcttcgcgctcatttccgttgtggttgcagttggtcggtgcagccttagtcagtggccccttgatgattatgtttcgtcaggaaattgttaatacgtggccaactgttattattggaacattaggttacttggtcttttatctgcttaaccggtatcttaaaattaaatttttgagcgagttaacggcggcacttctaattgggtttggcgcggaatgggtgtgtcagattgggtggggaaccaatgtcaatgatattattatcgggtcgttgatgccactagtgcccggagtgccattaacaaacgccgtacgagatactctggctggtaatttcgtcagtgggcctgcacgtggcgtggaagcgatgctgagtgcggcagcactaggctttgggatcgccgttgtcattacattattttaagtacgggcactagcctgggtattcggagggatcatgatgggcacaattggacaattagtgctggcttacattgcggtactggggtttggcctgattattaatattccacatcaagcgttaaacgttgcgggctggattggtaccctaacgtggggtggctatttgattgttcaggcttttgatggtggggtcgtcttaggaagcttaattggctcggtcggtattggcgtcctcagcagcttagcagctcgctacaagaagatgcccgctattatcttcaatattccgagtttagtttcattcgtgcccggcagtcaggcttatcagatggtgcgtaactttgcgctgggtaattatcgtgaggcggtttcattcacgttgcaagtgattatgattactggtgcgattgcattgggattcttattagctgaattactcaaccggcttatcgcattttgtattcgccagtggcggttgcaccgattggagtcgtaacctaactgttggctgattagttgtgaatcgtgaacaaagtttgcggacgctaagactaagcgccataaataaattccgccaaaagtggtgggttagtgcgactaatttgccgtgtgccagcgttctgaatagttacgcgcttagattagttattacgactcgcattcaatacagaaaaaggcgccaactgaactgctctactaagcagttcagttggcgccctttttaattagttagctgagacatcgcaacaagtagtcacgactcttatcatcaaatcagatggttagttttggttagcaaatttttcgccggttgtcgcagcctttaaattaagggacttacgtaagacgttcgtgacccgttgcttttcagattgcgaaacaacttcgaaagactgaccatcaatcatcttaccagtaccctgggcgtgatcagagacgatattcttggttgcactacggtaattagtgacgatactagttaaattaccgaatgttaagtcagtccgtgtttgtttagcaagtgaatttaagaaatcttgtttaagcaagttggaagcactggcgctttctccgataatggcggtaattaattgccgttgccgctgttgccgaccatagtcgccgagtggatcatcataacgcatccgggagtaagccaaggctttggcaccattcatatgttctttttggcccttagtaaaggtgtagccttcgtaggtaaatgtccgaattggagtaatgtcaacgccaccgatttcatccacaacttttttcatgccacccatgttgatcagggcgtaatagtcgattggaacgttcaaccatttttgaacggtcttgatggtcgttccggcactaccataagcgtaggcagcgtttaacttagtcgggaagtcctgttcgaagccggagacagctacttcagaatcacgtggtaaactcatcagggtcgttgtcttagtcttggggttgatcgttgctaagatgatcgtatcggtccggcctttatagttccgcccgagggccccggtatcagttccgagtaataggatcgagacgggtttcttgccattcaatacggcgctcgtattccgactctttttaataccactactcttgaagacggtgtcggccgcattcttggcgttaaaataagttcgcgcggcaaaggccccggtcccaactaataacacggcaataatgattaaaacggtattgcgaacggggtgcttcttcttgggcccgttgccgttcccctgtgaattgtttccttgtgatttctcacgatgcatttctgagcgacttggcatgtcttccatgaactcttcctccaatggtaatagttattcatagtttagcattttttcgggtcagcgggaactgaatccacgtaagatttagcttgattaccgatgactgtcagataaatcataacctttttgttaataaaacgtgattaaaatgggaattctttgtttttttttaaggttccctgagagatattaatgattcgttcagtcgattaatagactatggtataattttgttaattttaatattaaatgggggttcttgttttgatgatcgataagtcgcgtagtcggccgatcaagtttgtcattggggtaattttatttgcctacttaagctattttattagtgacggcgcggttggtattgatttactagatgtggccttaacgtcgctggtccaaattagtaatagcggtatttggacggtattttataaggtgattgcttggttggcgtcacccggaatggacattttgtggatcgtcatcctggcgtttctaatgtacggatttaaatataagattcaagcgttctggacgctagcatatatggttggttcaatggcgttaggctttattgtcaagcacatcatcggccgagcgcgaccaattggtcatttagcgcaggataccggatatagttatcccagtggtcacgttttaggaaccttcgtgttggtcagcgtgattatcatgttgattgttcctgagttgccaagttatcgaatggcaatgatcgtcaagtgggtgagtgtcgtatggttagtattggtcattttctcacgtatttacttgaatgcacattatccaactgatacgattggggccgtgctattggcatggtcttggagtcaaatcatgcaatggttctacgttttctgggcaccaggattattgaaatggccgttgttttatcgttcatatttataaagacaattaacaaacttaaactaatctattatttagcaggcaaccgtgtcactaaataatagactcaaaataaaaaatcgtttgctttaatcgacactactcggctgattgcgagaaattgatcgaagcaaacgattttttgtttacatctataaaatattaactagcaacgactggtaatgaactaacgattatcagctagccattcaagtgctaatgttaaccagtgggcgacgtgcggctgattggcgtctggtttccatgctgtttgtgcattcgcaagggctagtccgtgtgggccatgtttaaagacgtgtagttcataaggaatcttagcagttgctaacgcagtcgcgtaggcaagcgtattggttgctggaacaattgggtcgtcagccgttgtccagataaaagtcggctgattatctgaattgacgtgttggtcagcggccagttcattcggcgttggtgtccaggtagccaaggtcgcgtcatccttgggaaaacctagcaatggactgatgactggatagccgagtaccacgttattcggctttaacatggcgggcgttacgtttaattcagttgccacgcgggtcgcccagtaatcgttatacagtgccacaatgtgaccacccacgctaaaaccagcaggcgtgatctgttgcggatcaatatgccattcggccgcgtgttgacgaagcaagttgactgctcgtcctaaatctaatacgggtgctaatccgagtggttgttgatcagtgagtagcgtatattccaagtaaaaggcctggtaaccgtgcccagcgaaagccatggcgagactctctgcttgcgccactggaatatgcgtgtatgagccgcccgggacgataataatggcgggtaagttcgtttggtgtgcgttcgtatccggttgatgcaaataaccggtcaattgcgcgcacgtcgctgttaatttttgcttaataacttgcatgcaatcacctcaatttgatatggttaacataactattataacgcaagtcaggtggaacagatatgggcatggttacggttacaactcggaatgagcaactcgagttacggccatttacgttggcagatacagaggattattatgacttagttcgtgatccgtcaattgcggcatcggcgggctttacgccagcgcacagcttagtggaatccgaattcttattgaaacagcaatcgaagttaccacagatttttgcgattgaactaacagcgatccaccgcgtgattggcagtgtggggttgtatgagcgcatgaggaatacgggcgaaccagcaactttagagatggatctcgggtatatgttgaacgctcgatattgggggcggggcattatgacggcagcagttgcacgtattttacgatacgggtttgaaacgcttcatttgcggcggatcacagccagttgtctagctaataatccggcgtctaagcgaatcttagagcatgctaattttcgacagtatgatgctgttcgccatccagattacgccccgtttggcgctggtcagacggagttattctttgattgtgtggaattaaacctttaggaggtgagttaatgcaactcgcaaaatcgtttgaacaggccgcctgcgtgttggtattgttggctacgcagcaacctgagattccgttgactgcggatgtcttgcacgagcgaattggtggttccgcttcgtatattcggaagattattcgtaaattagtagtggcaggactggtcacgtccaccagtggaaataacgggggtgtccacttggcacgctcacctgaggacatttcaattacagatgtggtcgcggccatcgaggggacgttgcagacctttccgaattatggttattttgaccgagtatttaaggacgttgaaccggtcgctcatgaagggacgaaagtggtcaacgggattttttcgcgagcggatcaattatggttagattttttagaccagcaaaaactggcgacgttgatcaagaaattattagttgttactcaaatcccagtgttggattggacgaattactcagatgataaaatggcccaattaaatgcgttgcttagtcggatgcgggcacataagtgagacgtcgtacaaactcgataaaaattgggagcggtttcgcttggtaaaccaatattgacgcgcttttgccaatcggggatcattttcaaaatgatacactttatttcacaaggctgaaaatgctgttattaaagcgttttttatggtattctaacaatgaatttcacaagatagaggggaacaacatgccagataagaaatattacggggccgatgcgatcgtcgacagccttgtaaaccacgacgttaagtacgtattcgggattccaggcgctaagatcgatcgggtctttgagcgcttggagcacccagtcaatccgaaaagtccgcggttgatcgtgacgcggcatgaacagaatgccgcgtttatcgctgccggaatcggtcggattactgggaaacctggtgtagtgatgacaacatctggccccggtgccagcaatttagccacggggctcgtaacggcaactgctgaaggtgacccagtcttggcaatttctggtcaagttcagcgtgctgacttgttacggttgacccaccaaagtatgaataacgcggcactatttaagccgattacaaagtacagtgcggaagttcaagaaccggaaaacatttcggaagtgctcgcaaacgcctaccaagaagccacagctgctaagcagggtgccagctttgttagtgtgccacaagatgtcactgattcgattgtacgcacacctgttattacaccaatccaggcacctaagttaggacctgctagcccggtcgaagccacgttattagcacaaaaaatcaaagcagctaagttgccggtcttgctagttgggatgcgggcttcttcaccagaagtgacgaaagcaattcggaacttggtggctgctgctaatctaccagttgtcgagactttccaagcggcaggcgtgatctcacgtgatttggaagccaaccatttcttcggtcgggtcgggttattccgtaaccaaccaggggatatgttactaaagaagtccgacttagtgattgcggtcggttatgacccgattgaatatgaaccccgcaactggaatgcggaaggcaaatcccgtatcgtggttatcgatgcaatgcgcgctgaaattgatcataatttccaaccggaaaccgaattgatcggtgatattgcccagacgttagactttttgttgccgtacatgaagggctatgatattagcgatagtgcgcgagcttacttgggtgaattacaagaacggcttcagacgcgtgatttcgtacctaatattgataagcagtccaagttaaatcatccgctgtcagtaattgcagccttacaacaacgggtcagtgatgacatgacagtgacggtcgatgtcggcagtcattatatctggatggcgcgtcactttcggagctatgaaccacggcacttgttgttcagtaatgggatgcaaacgctaggggtggccttaccttgggcaattgcagcggctttggttcgtccagatacgcaaatcgtatctgtctctggtgatggtggtttcctattttccgcccaagagctggaaacggctgttcgactgaagcaaaatatcgttcatttgatctggaatgatggcacctacgatatggttaaattccaagaagaaatgaagtatggtgaggatgcagcggtccactttggtccagttgattttgtgaagtatgctgaaagctttggtgcgactggcttgcgggtaaaccaacctgctgatttggaaaaagtgcttgatcaggcctttgccacggatggtccagttgtggtggatattccaattgattattctgataacaaggcgttaggtaagacaatgttaccagaccagttttattaaaattaccattagtgaccggttgtcaaaagatggtcggtcagatataatggttgagtatatcgaaagaagaggatgcggttaacaatagtagccggctggaagtgggtcaccacttatgaaggtcagtgaacggggcaaccgccgaaatcgatggatcagtgaccgattcatccgttgggtcttggttgaataaatcaaggactgtcgcagctagaatagttgcggggcgctatcgacgatgaaatcagcaattatgtcaatcaatctgattaaagtctttttgcgcacgttatcgtgaggcagagaggctttttattttgattgtgctaacctgaatcggtgtgaacacttttagatataaatcgatttttggaggttctgcaatggcagaaaaacaacatcaggaagtgcatcgttccttacagacgcggcatttatccatgattgcattaggtggtagtatcgggaccgggctgtttgtcgcgtccggttcggcaatttcaacggctgggccagggggagcattactggcctacgttggtattggagtgatggtttactttttaatgactagtctgggcgaaatggcaacttatttgcccgtttcaggttcgttttccacgtatgccactaagtttgttgacccggcacttgggtttgcgatgggctggaattactggttcaactgggcaatcacgttagcggtcgatattagtacggcggcgattgtcatgcagttctggttgccatccgtgccggggtgggtttttagtctgattgcgctcgttttgatttttacgatcaacgcgctgtcagtccggtcgtttggagaaactgagtactggctttcgctaattaaagtggtgaccgtgctcgtattcttggttatcggtgtcttgacgatcgtgggaatcatgggcggtcatgccactggcctcagtaactttacctataaaaaggcaccatttgttggtggaattccaacgattttgagtgtcttcgtggtcgctggtttttcgtttcaaggaaccgaattaattgggatcacggccggggagtcagcaacaccggagaaaagtattccggcggctattaaacaagttttctggcgtattttgttattttacattttagccattttcgtgattgcggcgattattccttatacgtcgaaagatcttctagggtcatcagcgagcgatattgccatcagtccgtttacgttagtctttaaacgggctgggttggcggctgcggccagtgtgatgaacgcagtgatcttgacgtccgtattgtcagctgctaattcggggatgtacgcctcgacacggatgttatattctttgtcattacagggttatgcccccaagacatttggtcgggtcaatcgtcgtgggattccaatcatggcattattaggaacgacggtgatcggattactcacgttcttgtcgagtctattcggtgaacgaatttatattttcctcgtttcggccagtgggttaacgggctttatcgcttggctaggaatcgctatttcgcatctgcgtttccgtcgcgcgtttgttaagcagggtcatcaattgagtgaattgcggtaccatgccaagtggttcccatttggcccgtggttcgcctttatcttgtgtgtcgtggtcattattggtcaagacttacattcatttgcaacgcttgattggcaggctattggggtgacctatatgagcatcccgttattcatcatcttgtatgtctattataagattcgtcaccatactaagatgattccactagacaaggttgatttgacacgcaaacggcaccatcaagattaagcacgcactttgatagtttgagtaaatgcggttgacactgggtcaatcgcattttttgacggcgagagttgggcctgtcaactcaaggcgcggtcgtatttttaggtgtcctgatttatgctgataacactgctcacaacagatggtcacggcggatcgttatgagcgggggcttgcacgattgtaatgatagcaagcggcaaattgagggtgcgctaatctgatatctatggtaatttgatagaatgagaatatggaatcattaaaaattcgcaaacttatccttaagaataggctagtcggctatgactatgctaagctgaaatgagaaaggcagcgagagagatgttaaagagaaatttgttaagaggtctagcattagtgtcattagcaggtgtcctggctggctgtggtgctagccagtcgacgtctaaagcgactagtagttctacgagtgctaagtcgacgaagacgcagaccaagcggcaacgactgattagtgccttaccgaaaggcgttaaatcgaccgatagcgacttagtggtcgtcaataagtggcataagcgcgctgagatgacatttaataagtcgagcgtggatggtattgaagtccgtagttctatcgtcaaaccattggaagcctttctagcgggggcaaaaaaagccggctatccagcaacaatcgtgtctgggtatcgctcagtcgcttatcaaaaagaggtttggtatcagtcgattcaaacctatgagaatcaaggaaaatcagccaaggaagccttaaagctgactaaagaatatgtcgcagttcctagtggtagtgagcatgaaactggtctcgcagcagatatcatgaacacgcactggtacagcactcatggtaatcaattattgtcatcatccgacaagaacaagggtcagcagtggttgattaatcacgcggcggactatggatttgtgttgcgctttactaaagatggtaagcagtcgaccgggattgactatgaatcttggcatttccgttacgttggtaaggcgagtgcggaattcatgactaagcacaatttgactctcgaacagtacgtcagtttgctgcaagctcgagaaaaggcggccaagtaataagctagccgtattattgatggccccaattaataccatttatggcgtacgttaggaattagctagcgtgcgcttttaaattgtcttcggtttagcaatgtgggttcgtctcaactgagtattatttggtcacgacacgttgtcacttgatcatgctggtcagaggccgcactcaaagctgaagtgccaccagcgccggcttgggtaacccagtgtgtgttagtgagttgcttggatcgctgactagtgcgtcgcagttgtggctggtgcgaagttttttactgaattaactcaccagatattgcattttaagacgtgggtgcgtacaatatgtagtgttgcttttagagataatcaaaattttgacgtgattaaaaggagagacgccccatgcttgtaatgtcaggaacaatcggtgccggcaagacgagtttaacgcagttagtggctaaccactttggttctaaagcgttttacgagtcagttgatgataatcccattttgccgttattttataaggatcctaagaagtacgccttcttattacaaatctattttttaaataaacggttagacagtattaaatcagcttttgctaacgatctggacgtcttagaccggtcgatttttgaagattcattattatttcatttgaatggtgatcttggccgggcgacgaataccgaagttgacatttatgattcattattagataacatgatgcaggaattgccagaagcgtctcatcaaaagagtcctgatttacttattcatatcaatatttcttttgatacgatgctcaaacgaatccaaaagcggggccgttcttacgaacaaattgatcaagatcctgatttatataaatattatcagactttgaatgaacgctatgacgactggtacgctaattatgatcatagcccgaagatgcagatcgacggggatcagctggactttgtcgccgatgcggatgcgcgtaaggaagtcattcggttgatcgacgaaaaagtggctagtttaggctagttgcctttttagaatcaatgttttatagtagacagtgaatattaaacacggcgcgtttttaagtagacgttcagagaaccggtgggtggtgtgaatcggtagtcgaaactccggcgcgacaatgtgggcaggtaatactgcacggcacggccgttatccgtttaagggtgggattaatcatgatcctgaacttgggtggtaccgcgaatcgcagtctcttcgtcccaattgggaggagagactgtttttatttacgattaaaagtgaaaaggagacgtcgttatgttagatgttaaaatgattcgtcaaaatccagattttgtaaaagaacagcttggtcatcggggcgttgctgcgagtgacatcgatgatttattggccgctgatgaaaagcgtcgtgaattgatcgccaagagcgaacaattgaagtcgacgcgtaaccaagtttcaggcgaaatttcacagaagaagcggaacaaggaagacgctagtgccgaaattgcagaaatgcaaaaggttagcgccgatgtgaagacgttggatgaagaacggcggacagtcgatgcccaagttcaggatatggctgcacatttaccaaacatgccccatcccgacgtaccagttagcttgaaagaagaagatgccgttgaattacgtcgaatcgggacaccacggcattttgactttacgccgaaagcacattgggatatcggtgaagatttaggcatcttagactttgaacgcggtgctaaggtttctggtagtcgtttcttatactacgtgggcgatggtgctaaactggaacgcgccgtttacaactttttcttagaccagcacgaagctgaagggtatacggaagttttgccgccatacatggtcactgatgaatctatgtacggtaccggccaatttcctaagttcaaggaagacgctttccggattacgacgcaagatttgacgttgattccaacggccgaggtgccattagtcaactattatcgtgatgaagttattccggctgaaaaattaccagtttactttacggccttatcaccagccttccgtgaagaagctggtagtgctggtcgtgatacgaaaggcttgattcgcttacaccaattcaataaggttgaaatggttaagttcacgaaaccagaagattcatgggatgaattagagaagttgaccaacaatgccgaatcattgctaaagaaacttgggttaccatatcacgttattacgttaacgactggtgacatgagcttcacagctgccatgacacatgacttggaagtttggttcccagaacaagacaagtaccgggaaatctcgagttgttcaaattgtactgatttccaagctcggcgggcgcacattcaatatcgcgatgacgatggcaaattgcaattcgttcatactttgaacgggagtggcttagctgtcggtcggaccgttgcggccattttggaaaactatcaaaatgaagatgggacggttacgattccggatgtattagttccatatatgcacggtaagacgaagattgaaaaacaaggttaattgagatgaagttagcgaactcgcagtgatgcgagttcgctttttttgcataattaatgagtattaaaaggaactgtcgattttaaaatgtgagtggaaataacggccgagttgactaaataattgcgggacgggcagaatgtcgggacaacatttcaggcgcaaaagggcgaaaaagctgggtttactgaaatttattcacctttttttgaaaatagggtttgctattttcggctaccgtgctataatatttcttgtcggaaaaatataacttgtttatccagtaaaaagtatatttatccatttatttgaaaaaagttgttgacaagtattcaacatgatgataaagttaaatagttgtcaaggcataccagtaagaactgtttgaaccggcaacaaggcatgattaacatcatgcgggtgtggcggaactggcagacgcgctagatttaggttctagtgtcttacgacgtgggggttcgagtcccttcacccgcacatgccgacttagctcagttggcagagcatctcactagtaatgaggaggtcggaggttcgaatcctctagtcggcatttacaatttaatagctttattatgcggaagtagttcagtggtagaacatcaccttgccatggtgggggtcgcgggttcgaatcccgtcttccgcttttaatttgccggggtggcggaattggcagacgcacaggacttaaaatcctgcggttagtgataaccgtaccggttcgatcccggtcctcggcattttaaataagcacccatagcgcaattggatagagtgtctgactacgaatcagaaggttgtaggttcgactcctactgggtgcattagtatcgggaaatagctcagcttggtagagcacctggtttgggaccagggggtcgcaggttcgaatcctgttttcccgatcgtttaacacagtcttagttaagtgctaaggctttttatttaattttctcgggaagtagctcagcttggtagagcactacgttcgggacgtaggggtcgcaggttcaaatcctgttttcccgattacggttaaaccaactaatccagtcatttggctggatttttttatggccttttttgtaagcaggggtgtttcaacggtcaggggacacttttgcgacgttactcactaagtcagccatgtgaagaatacggtggttgtgactcataatcccgacaaggcaacagccactgttagtcatgagctcggagaaattagtctcggaactgctgttcatcgttgtgataccagtgcccatcgcctgcaatgaggagtgactcaacttgacatattttaaataggtagttcaatgaatatggagacctaataatttaatcattatgaggttctaaacggttgaatcaattgaaagcaaacgttcggcgtgctatgctgtaacaaccgttaagcacatgctagtccgcggtttgggtgaaattctttgcttttttccattatcctcgtataataatagtcaatattagtcaaagataatgaaaagggtgaagcacatgcaaagtcaaaatatctcggatattattgaaaagtatttaaaaagtattttggcggactcggagcatgttgaaattcgacggtcagaaattgccgaccttttcaacgtggtaccctcacagattaattatgtgattaagacccggtttacgatccaaaatggttacttagttgaaagtaaacgtggcggtggtggttatattcgcattgagaaggttaatttggtcgatgatgctgatgtgttggacgccctcatacaggtgatcggcgattcaatcacacaacgagatgcttatgcggtcgtccaaagtttatacgaggacgacgtcttaaatcgtcgagaagcgcaattgattttagtggcgattgaccacgagacgttaggattaacggaccgggacttagaaaacagtctgcgggcccggataattatcggaatcttgaaccacttgcgttacgaaagctaaagaaagcgaggaatcgcaatggataacttatttacacctagtgccaaaagtgtgctggtactggcacaggaacaggccaaatatttcaagcatcaggcagttggtacggagcatttgctattagcattggccatcgaaaagaatggaattgctaataaggtgctacaacaatatgccgttagtgaagatgacattcgtgaagaaatcgaacggttcactggctatgggacgttgagcaatgttggcaaggatacttacttgccatattcaccaaaggccaaagaaattttgtccgttgccggtgatgaagcaaaacggctcggtgccaacaagattggaacggaacatttgttgttagcgatgctctctgatgaaagtatcctttcctcgcgaattttaatgaatttaaacttagatctaggtcagacgcgtaaagtcgttcttcgcaagctaggtgtcagtgacgccatgagtaagcgcaagggtaacgcggctaatcgcggtggcaagaagactgaaggaacgccaaccttggattctctggcgcgcgatttgacccaattagctagtgaacaagaaatggacccggtagtaggtcgttccaaggaagtcaaacgggtcattcagatcctgtcacggcggacgaagaataatccggtcttgattggtgaacctggggttgggaagactgcaatcgccgaaggtctagcccaaaagattgtggccggtgatgtgccaactgatatggcagataagcgtttgatgatgctcgatatgggatcgttagtcgctgggacaaagtatcgtggtgaattcgaagaccgcctgaaaaaagtgattgatgaaatttacaacgatggccatgtgatcttatttatcgatgaattgcataccttgattggtgccggtggtgctgaaggggctattgatgcctctaatattctgaaacccgcacttgcacgaggggaactccaaacgattggggcaaccactttaaatgagtatcaaaagtacattgaatctgacgctgcgttggaacggcgttttgcaacggtcatggtcaatgaaccgaccgaagacgaagccgttgaaatcttagatggactacggccacgctatgaagaacatcatcgggttacgattacggatgaagctgttgatcaagcagtcaagctatccagccggtatatcagtgatcgtttcttgcctgataaggccattgacttgatggatgaggcggcagctaaagtccgcatcgatcagatggatcaaccaacaaagctatccaagaaccaggacaagttagcgcaactgcgtgaggataaggaaacagcgatcgaagcacaagattttgaacaggccgctgatattcgtaagcaggagatgcaactgaagcaacgcctagatcgaatcgaagctgaccaagacgccgaagtgactgagggggcaacaccacactatgatttacaagtcacaggtgaggatattgctcaggtcgttgccgaatggaccggggttccgttaacgcaattgcaaaaatctgaaagtgaacgcttagttaacttggaaaagattttgcatgaacgggttgttggacagccagaagccgtatccgcagtggctcgtgctattcgccgtgcgcgcagcgggttgaaagatccgagtcggccaattggttcctttatgttcttaggaccaactggggttggtaagacggagctagcaaaagccttggcagcagcgatgttcgggtctgaagataatatgattcggatcgacatgtctgaatacatggaacgctattcgactagtcgtttgattggctcggcacctggttacgttggttatgacgagggcggtcagctgacagagaaggttcgccagaaaccatactcggtcgtgctatttgatgaagttgaaaaagctcatccggacgtctttaacattttgttacaagttttggatgacggctacttgacggattctaagggtcggaaggtagacttcagaaatacgattctgattatgacgtcgaaccttggggcaaccacacttcgtgatgaaaaatcagttggttttggtgcaactgataaggccaatgactacaatgcggttgctgcgacgattcgagcaacgttaaaacagacgttccgcccagaattcttaaaccggatcgacgaaacaatcgtcttccattcattgaataaggaagaattacacgaaatcgttaagttgatgtcacaagaaattgttgatcgagtggcccaacaaggtatcaagatcaaaatcactccggctgccattgacgtggttgcgaaggctggctttgaccctgagtacggagcacgaccaattcgacgggcattacagactgaaatcgaagatcggttgagtgaagaattattgaccggcgcgatcaaggtcgatgaccaagttacgattggtgctagcaagggtaccattacaattaatattaaaaaccagcctaaggcagatggtcgttcgaccgtttcctcaaagtaggcgcgattaaattaaagatgacgcttgaagtggtagtccacttcaggcgtcatcttttaggttcaatcggtattaagatgctacccactgaagtgaactgtaggatctgaggctggtggttcggtgctgattggtgtaaattataataggaaataaagtcaagaaagaagatgataacatggcgacacgagccgaacagatggcgaagacgcaccaggcgattttagacacagcccgggaactgtttttaagaaatgggtatgatgcgacaagtacgcgcgacattgcgaatgcgattggcattacgcagcccgcgctttatcaccattttaaagataaagaggtcatctttctggctgtcattacgacggtcggtgcggaaatcaaggctggcattgaagcgattcaagtccgtgcggattggtctccgttggatcaattaacagaagtctcgctattactaacgcataagcatccggctgatgtcttcacgttaattcattccagtttcaaagcattaacgcatgaacatattcgcgagttgggcggcatatttgttactgattatgtgaagccgattcaaaccgtttttgagcaacctgacatgcaactacatgtgggggtcacgccacagatggcgacgaatttctatatcaccagcttgagtccgctgtttaacagttttcatcaaatcggtgatcctcatgctgacgagcggacccgcgttcaaacccttttgaagatgatcttatacggggttgcgagtgaaccagaaaactaatggcggcagagaagtctactagttgacaactaacgttattcgatgtatattataacttgtctgtaaccgtgaactcgagcgaacgcgcaatctattgtctgtgcggctcgttaatataaatccaaaaatagtcaacttaagcgactatttttggtttttttatgcctaaaattcggtcaaaaacgcatttgtaacacaaatgtaatatttggctggaggtggcgggttccggaataataagaaggggtgaacaacttggccggacatttagtaaaatacggtaaacaccgtacccgtagaagttatgcacgtatcaaggaagttcttgatttgcctaacttgatcgaaatccagaccgattcttaccaatggttcttggatgaaggtctccgggaaatgtttgaagatattatgccgatcgacgatttcgcaggaaaactttcacttgaatttgtcgactatcaattattagaaccaaagtacaccgtcgaagaagctcgtgaacatgatgccaactactcggcaccattgcacgttaccctacgtttaactaaccatgaaactggtgaaattaagtcgcaagacgtattcttcggtgattttccattaatgactgaacaagggacgtttattatcaacggtgccgaacgggtcattgtttcacaattggttcgttcacccggcgtttacttcaatgaagaattagataaaaatgggcgtcctagctacggcacaacggttattcctaaccggggtgcttggttagaacttgaaactgacgccaagaatgtttcatacgtacggatcgaccgtacgcggaagattccattgacggaattagtccgggccttaggctatggttctgacgatgacattattgacatgttgggtgaaactgacagtttgatgttgacgttggaaaaggacgttcataagaacaccgacgactcccgggttgaagaatccttaaaagatatctacgaacggctacgtcctggtgaacctaagacggctgacagttcgcggagcctattgactgctcggttcttcgatccaaaacggtatgacttcgcaccagttggtcgctacaaggttaacaagaagttaagcatgaagacgcgcttaatggaccaaacgttagctgagacattagctgatcctgatactggtgaagttattgcgcaaaaggatacggtcattgacaagaatgtcatggctaaactatccccatacttggaacgtgacgactttaagacggttacttacacaccatctgacgaagccgttgttacgaatccaatggtcttacaagttgttaaggtttattcacaaaacgaccctgaaaaggttgtgaacgtgattggtaatggcaacattgatttgaagttcaagcacattgtgcctgctgatatcattgcttccattaattacttcttcaacttgcaagaaggtcttggctcaaccgatgatattgatcacttgggtaaccggcggattcgttccgtgggtgaattattgcaaaaccaattccggattgggttatcccggatggaacgggttgtgcgtgaacggatgtcgattcaagatgctgcgacggtaacgccacaacaattgattaacattcgcccagtggttgcttcaattaaggaattctttgggtcatcacaattgtcacaattcatggaccaaaccaaccccttaggtgaattaacgcataagcggcgtttatcagccttaggacctggtggtttgactcgtgatcgggccggatatgaagttcgtgacgtgcactatacccactacggtcggatgtgcccaatcgaaacgcctgaaggccctaacattggtttgatcaacagtttgtcttcttatgcgaaggtcaaccgttacggcttcatcgaaacgccataccggcgtgtcgattggacaacgcataaggttaccgataagatcgactacttagcagccgatgaagaagaccaatttgtgattgcacaagccaactctccattgaatgatgatggttctttcgttgaagacactgttttagctcgtaacaaggaagaaaacttggaaacgccaatcgaaaatgtcgattacatggacgtttcgcctaaacaagtggttgccgtcgcaacggcatgtattcctttcttggaaaacgatgactctaaccgtgctttgatgggtgccaacatgcaacgacaagcggtgccgttacttgatcctcacgcgccattaattgggactgggattgaatataaagctgcacatgactcagggattgccttgatttgtcgtcatgaaggaacggttgaatacgttgatgctcgcgaagttcgcgttcgtcgcgatgatggttcattagacacttacaagttaatgaaattccgtcgttctaacggtggtaagaactataaccaacggccaatcgttaaagttggcgatcacgttgataacgatgaagtcttagccgatggtccagcaatggaaggtggggaattagcccttgggcaaaacccattagttgctttcatgacctggaatggttataacttcgaagatgccatcattattaatgaacgtttagtccgtgaagacgtctacacgtcaattcatattgaagaatatgaatcagaagcacgtgacaccaagcttggacctgaagaaatgactcgtgaaattcctaacgtcggggaagatgcattgaagaaccttgacgaagacgggattatccggattggggccgaagttaaagacggtgacatcttggttggtaaggtaacgcctaaaggggttacggaattgtcagctgaagaacggcttctccatgcgatctttggtgaaaaggcgcgtgaagttcgggatacgtcactccgggttcctcatggtggcggcggtatcatccaggacgttaagatcttcactcgtgaaaacggtgatgaattatctcctggcgttaacatgatggttcgggtctacatcgcacaaaagcggaagatccaagttggtgacaagatggccggtcggcatggtaacaaagggacggtttcaatcgtggttcctgaagaagacatgccgtacatgcctgatgggacaccaatcgatatcatgttaagcccaatgggtgtgccttctcgtatgaatatcgggcaagtgctcgaattgcatttggggatggctgctcggaagttaggaattcacatggcaacgcctgtctttgatggtgctcaagatacagatatttgggaagccattcgtgaagctggggttgattcagatgccaagtcgatcgtctatgatggtcggactggtgaaccgttcgataagcgggtcgctgttggggtcatgcactacatgaagcttagtcacatggttgacgataagatccatgctcgttcaatcggaccttactctttggttacgcaacaaccacttggtgggaaagcgcaatttgggggccaacgtttcggtgaaatggaagtttgggccttggaagcttatggtgcagcttataccttgcaggaaatcttgacttacaagtccgatgacgttgttggtcgggttaagacctatgaagcaatcgttaagggcgaaccaattccaaagcctggcgtaccggaatcattccgcgtgttggttaaggaattgcaagcactcggtcttgacatgaaagtcttggattctgaagacaaagaaatcgaattgcgggacatggatgatgatgacgatgaagttgtcaatgtcgatgcactcagcaagtttaaacaacaacaagatgagaaggctgcggacaaggccgcaaaagctgacgccgctaagccttctgaaacaaccaacgctcagcaagataatcaataaaaagggaggtcggtcctttgatcgatgtcaacaagtttgaaagcatgcaaatcggtctggcatccccagacaagattcgcagctggtcatatggcgaagtcaaaaagccagaaaccattaactaccggacattgaaacctgaaaaagacggtctgtttgacgaacggatttttggtcctactaaggattgggaatgtgcttgtggtaaatacaaacggattcgttataagggtattgtctgtgaccgttgtggggtcgaagtgactcgtagtaaagtccgtcgtgaacggatgggtcatatcgaacttgccgcaccagttactcacatctggtactttaagggaattcctagccggatgggcttagtcttagacatgagtccccgggcacttgaagaaatcatttacttcgcttcatacgtcgttatcgaatctggtaatacgccacttgaaaagaagcaattactttctgaacgtgaataccgtgagaagaaggctcaatatggtaacgaatttgaagctgccatgggtgccgaagccatcaaacggttattgaataacgtggatcttgaaaaagaggcacgtgatttaaaggaaactctgaaggatgcttctggtcagaagcggacccgggccgttcggcggcttgatatcatcgaagctttcgtgacatctggtaacgaaccagcttggatggtaatggacgcaattccggttattcccccggacttacggccaatggttcaattggaaggtggtcgttttgccacctctgacttgaacgacttgtaccggcgggttatcaaccgtaataaccggttgaaacgcttgttggacttaaatgcacctgggattatcgtgcaaaacgaaaagcggatgttgcaagaagccgttgatgcgttgatcgataatggtcgtcgtggccgtcccgttgctggtcctggtaaccggccattgaagtctctttcacacatgttgaaagggaagcaagggcggttccgtcaaaacttacttggtaagcgggttgactattctggtcgttcggttatcgatgttgggcctttcttgaagatgaaccaaatgggcttaccacgtcaaatggcgttggaattgttcaaaccgtttatcatgaaggaattggttaaacgtgaattagcttctaacatcaagaatgctaagcgaaagatcgaacatgctgatgacgatgtctggggtgtgttggaagacgttatcaaggaacatcctgttctcttgaaccgcgcccctacgcttcaccgtttagggattcaagctttcgaacccgtcttggttagtggtaaagcgatgcggctccatccattggcttgtgaagcttacaacgccgatttcgatggggaccaaatggctattcacgtcccactttcagatgaagcccaagctgaagcacggctcttaatgttagctgcccaccatattttggcgcctaaggacgggaaacctgttgttacgccatctcaagatatggttatcggtaactactacttgacgactgaagaaatcggtcgtgaaggcgaaggtatgatcttcaaggacttgaatgaagctcaaaaggcttaccaatcaggttatgtacatttgcatagccgggtcggcattcaggtctcatcaatgcctgacaagccattcacggacgatcagaagcaagcagtcttagtcacgacggttggtaaggcaatcttcaacaacattttgcctggcaagttcccttacttgaacgaaccaactaacgataacttgattgctggtacaccggacaagtatttcttgaagcctggtgaagatattcatcaattcttggatgcccaggaaatcattccaccattcaagaagggcttcttggccgacattatcgctgaagtttacaagcaatatcacgtgacagcaacgtcactcttgcttgaccggatgaaggacttaggttacaacatttcaactaagtctggtttgacggttggggttgccgatattactggtttgaaagaaaaaccagcaattatcgccgaagcccataaacaagttaatacgatttcaaaacagttccgtcgtggtttaattactgatgacgaacgttatgaacgggtcattggtgtctggaacgacgctaaggaccaaatccaacaaaaactgattgaaagtttcaacgcggataacccaatctttatgatgagtgattctggtgcgcgtggtaacatttcaaactttactcagttagctgggatgcgtggtttgatggctgcccctaacggtaagatcatggaattaccaatcctttcaaacttccgtgaaggtttgtctgtcttggaaatgttcatttcaacccacggtgctcgtaaagggatgaccgatacggcgcttaagactgccaactcaggttacttgactcggcgtctggttgatgtggctcaagatgttatcgttcgtgaaaaggattgtgggactgaccgtgggttgcggattcacgcaatcatggaaggtaacgaagtcatcgaaccgttgtatgaccggatcttaggtcgttacacgatgaagactgtctttgatcctgaaacgcatgatgaaattgtcggtaacaacgtcttgatcgacgaagacttagctcataaaatcgttgatgctggtgtaacggaagttacgatccgttctgcatttacttgcaacactaagcatggggtttgtgaacattgctacggccgtaacatggctactggtgatgaagttgaagttggtgaagctgttgggacagttgccgcacagtctatcggtgaacccggtactcagctgaccatgcggaacttccataccggtggtgttgccggggatgatattacccaagggttgcctcgtgtgcaagaaattgtggaatcacggaatcctaaagggcgtgccgaaatctcagaagttactgggacggttgaattaattgaagaaaatccagcggaacggacgaaggaagttacggttaagggtgaaactgatacccggacttacacgttgccgttaacagcacggatggcggttagtgaaggcgactttattcaccgtggtgctgcgttgaacattgggtcgatcgatcctaagcaattgattcaagtacgtgatgtcttatcaactgaaaactacttgctccgtgaagttcaaaaggtttatcggatgcaaggggttgaaattggcgataagcacgttgaaatcatgattcggcaaatgttacggaaggttcgggtcatggatccgggcgataccgacgtcttgcctgggacgttaatggatattgcagacttcaaggacgagaactacaagaccttgattgctggtggtattcctgcaacgtcacggccagtcattcttgggattactaaagccgctcttgaaacgaatagtttcttgtcagctgcttcattccaggaaacgacacgggtcttaactgatgctgctattcgtggtaagaacgatccactgatcgggcttaaggaaaatgttatcattggtaagatcattcctgctgggactggtatgccggtttaccgtcatatcaaaccaaaggaagttggcaacgtggctgatggggtttactcaatcagcgaccttgaaaaacaaatgcaagaacaagatgctagcaagtaattgctaagtaactaaaaagggcggccattgtggtcgtcctttttgtatgcacgattgtaggtaggctatctggggcgttcggcgatgaaggttaatcttcagggggggaagactaactgagcctcgctggaaaagttcaagtttgtgtaaacttgcttagttagtgtgtcctgcactgcgctccaggcatttctgttaattgctggactgccgtgccttaatactatattggtgaaacgtgttcagattggaatgagactttcggttagctaacactaatcctcagtctcagcccgtctaaaccgcacactcttgtagtgctaagaaacgtcttccgctcgggatggtgttcgaatggtgggcacgtgcgtacgcaacttttgacggattagtcgttacttttttgagaccggaatcttatcaggtaactttcaggttaataatagaattgtgagctgtccccgatttctaaatcaccatattactactgagggtcagaacaactgatacgatattaacgcttgtttaaagttccaagtagtaaacaattcgacgacaaattgtaccagttgagtggtcgttcatccgaacaggacgcgcactgactaacaagcaataatcggacgtactagaacattgcaattatagctcgctatgcgagacccgtgagttgggtgaccatgatgaagctccaactgatgaagggcacgaatggtaagcgatggcgtggggcactgatgataaaaccaactaatgcggcaacggccgcaatggcgagacaggtcaacagtgtgtcggctggaatgatgaaaacaagcatgagtagaacgtcaacatcgccgagaccaaaggtggcagttagccgggccagcaagtataacccgactagtaaggcaagtacgaggtagagactgatcgtcaggggtggccgttgttgccataagcccagtccggctggaagaagtaatgtcagcgggtagacttcaaaagtgagataatcagtaagactattgaaatcaataccaagtaaccaatcagaagtggcagcgtcaatgacaatgacgcactgctagaagctagtagactaccacaaagtaattcaatcagactggaacggaggctgataggagtgcgacaatcatagcactgtccccgttgaagtagaatgccgagtaatggtatcagttgccagaaccgtaattgatgccggcagtgtggacaccttgatcgttgagtgctaatgagtatgtgtccgttgctgatgcgttccgccatacaggtcacgaatgagcccagacagaggccaataataaaaagactgctggttaacatggaaggaccacctttcatcactagttacgcaatgtaaagcaccactattttttcaggacatttattgacaacttcggcatgtcatgatagtctagtaaaggtgctttttgcagacagattcctgtatcaggaatacagacatgctgactggtcggctaagcgcacaattaccatgctccaggcattcttttttactcaaaaaagaaccacctggatgtgtggacttaaaaaacagatatttggaaggaggacactttagaacatgccaacaattaatcaattaattcgcaaaggccgtaagtctaaagtatcaaaatcaaatgccccagcgttaaactttgggtataacagttacaagaaggttgcaactaataacccagcgccacaaaagcgtggggttgctactcgtgtcggtaccatgactcctaagaagcctaactcggctttacggaagtatgcccgtgtacgtttatctaacttaatcgaagttacagcttacattcctggtattggtcataacctccaagaacatagcgttgtcttaattcgtggtggtcgtgttaaggatttacctggtgttcgttaccatgttatccgtggtgctttggatactgctggtgtcgaagatcgtcgccaaagccgttccaagtatggtaccaagaagccaaagaaataataaggaggtaagttaaatgccaagaaaaggtgcacctgcaaaacgcgaagttttagcagatccaatgtataactctaaattagtaacgcgtttaattaaccacttaatgttagatggtaagcgcggtaccgcatcaactattttgtatgatgcttttgatcaaatcaaagaacaaactggtaacgatcctttggaagtcttcgaagaagctatgaagaacgttatgccagtacttgaagttaaggcccgccgtgttggtggttctaactaccaagttccaatcgaagttcgcccagatcgtaagacgactcttggccttcgttggatcgttcaatatgctcgctcacgtggcgaacacactatgtccgaccggttagctcgtgaaatcatggatgctgctaacaatactggtgcttcagttaagaagcgtgaagatactcaccggatggctgaagccaaccgtgccttcgcccattatcgttggtaatatttccgtgagatggttaaaggtcgcctttaactaatcacaaaaaggtgactattatatgcgcgcatatagtagtcattttttgaaataaactttatactgttaattccatttatattgagaggagtaacacattttctaatggctaatacacgagaattctcactcgataagacccgtaatattggtattatggcccatatcgatgctggtaagaccacgactactgaacggatcttgtactacactggtaaaattcacaaaattggtgaaacccatgatggtgcttcacaaatggactggatggcccaagaacaagaacgtgggatcaccattacctctgctgccacgactgcacagtggaagaaccaccggattaacatcatcgataccccagggcacgttgacttcactgttgaagttgaacgttcacttcgggttttagatggtgcgatcgccgtattggatgcccaatcaggtgttgaacctcaaactgaaacagtttggcgtcaagcatcaacgtataacgttccccggatcgttttcgttaacaagatggacaagattggtgcggacttcaagtactctgtaagcacgatccatgatcgtttacaagctaacgcccacgccatccaattaccaattggtgccgaagataatttcgaaggggtcattgacttaatcgaaatgaaggctgacctttatgatgaagatcaacttggtactgaatgggatacggttgacgttcctgatgaatacaaagaagaagcccaagctgcacgtgatgacttaatcgaagccttagctgacatcgatgacggcatcatggaaaagtaccttggcggtgaagaaatcagcaaagaagaaattaaggctgctatccgtaaaggaacgttagcacttgaattcttcccagtattagctggttcagccttcaagaacaagggtgttcaaatgttaatggatgccgttgtggactacttaccatcaccacttgatgttaagccatacaaggctactgatcctgaaactgaagaagaagttgacttgattgccggtgatgataagccattcgctgccttagcatttaaggttgctactgacccattcgttggtcgtttgactttcatccgggtataccaaggtactttggaatctggttcatatgtcttgaacgccactaaggacaaacgtgaacgggttggtcgtttacttcaaatgcattctaaccaacggaaagaaatcccagaagttttctctggtgatatcgccgctgcaattggtttgaagaacacgactactggtgactcattgacttcgattgaccatccatatcacttggaatcaatggaattccctgacccagttatccaggttgccgttgaacctaagactaaggctgaccaagataagatgaacgttgccttacaaaagctttctgaagaagatcctactttcaaggctgaaactaaccctgaaactggtgaaactttgatcgccgggatgggtgaattgcatttggatatcatcgttgaccggatgcggcgtgaatttaatgttgaagccactgttggtgcgcctcaagtttcataccgtgaaacctttactaagagcactcaagttcaaggtaagtttgttcaccaatctggtggtaaaggtcaatatggggatgtttgggttgaatttacacctaacgaagaaggtaaaggcttcgaattcgaagatgccatcgtcggtggggttgttcctcgtgaatacattccttcagttgaacaaggtttgaaggaagctatggctaacggtgtgttagctggttatcctttggttgacgttaaggctaagctctatgatggttcttaccatgatgtcgattctagtgaagcagccttcaagattgccgcatcattagcattgcggaatgccgttaagactgctggccctgttatccttgaacctatcatgaaggttgatatcgttgccccagaagattacttaggtgatgttatgggtcacgttactgctcgtcgtggtaacatcgaaggtatggaagaacgtgggaatgcccaagaagttcatgcatacgttcctttggctgaaatgtttggttatgcaaccacattacgttcagctactcaaggtcgtgggactttcacaatgacctttgatcattacgaaaaggtaccaaagtcagttcaagaagatatcatcaagaagaatggcggcactcctgccaaataagcttgattgataataagaaggacgttcagcttcggctggacgttctttttttacataaatttctggtcgaactaaatgtgattactgctcgtcgtaagacaacgtggcacatcaattgaagcggcttgggataagtttggccgtcactggcattgggtacggctgtgacgagcacagtgctgctcaggactatgtcatcgcgcaagggtacaaccgcgcaacaagggtcgcactagttaagttactagccgctgcgaccataaaactggcagccataatattaagggtgcgagactcatagcataataaggagaacgcggacaacatcgcattttttgtatcggagatgaccacttgagttgacggttgtcagtggccacggccaaggtgctgacggtcggtgataagtagatgacaatataatagaaggtagatgaacaagaacgtgggtcagtgtgacggcgccgtcagatgtaggagcggttgaattaagcgtgttgaagtccgattaaatgactccagacaaaaatgtatgacgctgaacgcgggtcttgttcctgagaaagtgttaatgcaatctagtaggtgtccacatgatcgtggccggtcggcagtgagaaatgtaaagcgctcaccaaaaagaaattaggcgcaaacgctattaattggatggaatttgtgttacattaattgagctggttcaaaaaggtaacacggtttacaacgatggttataaaaaaagtgcgaaaacacttgctattacagagcttttcatttattatagattgtgcttggtatttagaaggggataactatatctccatcatcaagtagtcgtagttagctttgatgtgaaaggttgcgacacgcccggccacattgtcatgggacgtggcggtaattttcacggagctagtcttattttcaaaatagacgaaggaggtcacaacaatggcaaagcaaaaaattcgtattcgcttaaaggcatacgaacaccgcattcttgatcagtcagctgacaagattgtcgaaacggcaaagagaactggtgctactatttcaggtcctattccattgcctactgaacggactatttataccgttctacgttcaccacataagtttaaggactcacgtgaacaattcgaaatgcggactcacaagcggttaatcgatatcgttaacccaacgcctaagacggtcgactcattaatgaagttagacttgcctagcggtgtagatattgaaatcaagctttaatttactaaactaaaatcaattaattggaggtgtactcatgaccactaaaggaatcttagggaaaaaggtaggaatgacgcaagtcttcactgaaagcggcgaattagttcccgttacagttgttgaagttcaacctaacgttgtgttgcaagttaagaccgttgaaaatgacggttacgaagcaatccaattaggtgttgacgacaaacgcgaagtcttgacgaacaaacctgctcaaggtcatgcagcaaaagcaaaaacgactcctaagcgcttcattcgtgaaattcgtaatgttgagcttggagattacacagtaggtgacgaagtcaaagcggatattttcgcagctggcgacgccgttgacgttacgggtatcactaaaggtcatggttaccaaggtaatatccataaggacggccaaagtcgtggaccaatggctcacggttctcgttaccatcgtcgtcctggttcaatgggtgccatcatcaaccgggtattcaaaggtaagaaattaccaggccggatgggtaatcaccaacgtacgatgcaaaacttacaaatcgttcgtgccgacgttgaaaacaacgttttattaattaaagggaatgtccctggcgccaacaagtcatttgtaacagttaaaacatctgttaagagtaaataaggaaggaggacataatacatgactagcgtagcattatttaaacaagacggtacgcaaaatggtgacgttactttgaacgacgctgtgtttggtgttgaaccaaacgaaaacgtggtttttgatgccatcttgatgcaacgtgcatcaatgcgtcaaggaactcacgcagttaagaaccgtagtgctcgtcgcggtggtggtcgtaaaccatggcgtcaaaagggtactggtcgtgcgcgtcaaggttctatccgttcaccacaatggcgtaaaggtgggattgtcttcggaccaacccctcgttcatacagttacaaattacctaagaaggttatgcgcttagctttgaagtctgtcctttcacaaaaggtcttagacaacagcttagttgcagttgatagcttagctttcgacgcaccaaagactaaggattttgtaaatgtattaaacaacctcaacgtcgataccaagactcttgttttggttgaagaggacaatgaaaaggctgctttggcaggtcgtaacttaccaaatgttaagatccttaaagccaaaggtgttaacgtcttagatgtcgctaatagtgacaaattagtcgttacccaaaaagccctcgatcaattagaggaggcgctcgcataatggaagcacgcgatgtaattttacgtcctgtagttactgaatcatcaatggctgacttggacgacaagcgctacacatttgatgtcaacgtacaggcaacgaaaacccaagttaaaaaagcaatcgaagaaatcttcgatgttaaagtcgttaaagtgaacgttatgaacgttaaaggaaaacttaagcgccaaggtcgttacgccggctacactaagaagcgtcgtaaggctattgttaccttaagttctgattctaacgaaatcaagttgttcaacgacgatcaacaataaatctaatttaggaggtaactctagtgggtattaagaagtataaaccaaccactaacggccgtcgtaatatgactgcttcagatttctctgaaatcactaagacgaagcctgaaaagtcattattagactcacaaagtcacactgccggtcgtaacagttatggtcacattactgttcgtcatcgtggcggcggtcataagcaacaataccgtttggttgactttaagcggattaaggatgaagttccagcaaccgttaaggcaatcgaatatgatcctaaccggacagctaacattgcattattagtttacgctgacggtgtgaaatcatatatcttagcaccaaaaggtttggaagttggtatgcaagttcaatcaggtgccgaagccgacatcaaggttggtaacgcattaccattaactaacatccctgttggtactgttattcacaacattgaattgaagccaggtaagggtggccaattagctcgctctgctggtacttcagcacaattactgggtaaggaaggcaagtacgcaattgttcgtttgtcttctggtgaagttcgtttagtattattaactagccgtgctactattggtactgttggtaatgaacaacacgaattaatcaactcaggtaaagccggtcgtacacgttggcaaggtaagcgcccaactgttcgtgggtctgtaatgaaccctaacgatcaccctcatggtggtggtgaaggtaaagcaccaatcggtcatccatctccaatgtctccatggggtaagaagacgcttggtaagaagactcggaacaagaaggctcgttcaaacaagcttatcgttcgtggtcgccgtccaggcaaacactaataaaatttgaatttactgtagttatcgagaggaggtcacacgatgggtcgtagtttaaagaagggacctttcgcagatgcgcatttattaaagaaaatcgatgcacaatctgattctgacaagaaatctgtcatcaagacgtggtcacgtcgttcaacaattttcccaagttttatcgggtacacaatcgctgtttatgatggtcgcaagcatgtcccagtttacatccaagacgacatggtcggtcataagttaggtgaatttgtaccaacacggacgttccatggtcatggaactgacgataagaaaacgaagtaatagttaggaggatataaagaatggctgaacaagtaacatctgcacgtgcaactgcaaaaactgttcgtattgccgctcgtaaggtccgcctagttgtcgatcttatcagaggtaaaagtgttgccgaagccttagcaatcttgaagttcactccacggggtgcttctccagtagtagaaaaagttttactttctgctgttgctaacgctgaaaataactttgacttagatcgcgaagatttggtcgtaagcgaagcttttgttaacgaaggaccaaccttaaaacggttccgtccacgggcaaagggttctgcttcaccaatcaacaagcggactagccacattacgatcacagttactgaaaaataggagggataacgcgtgggtcaaaaagtaaatccaaccggattacgtgtaggaatcattcgcgactgggaagcaaaatggtacgctgaaaaagattttgctgcctacttgaacgaagatttacgcatccgtaagtatatcgaacaacgacttgccgacgcttccgtctccaccgttgaaatcgaacgcgctgcaaaccgcgtaaacatttcaatccataccgcaaaaccagggatggttattggtaagggtggttctgaagttgaagctcttcgtaaagaattaaacaatttaactggtaagcgagtacacatcaacatcatcgaaatcaagaagcctgatttagatgctaaattagttggtgaaagtattgcgcgtcaattggaaggccgggttgctttccgtcgtgcgatgcgtggtgctatgcaacgtacaatgcgttccggtgctaagggtattaagacacaagttgctggccgtttaaacggtgccgacatgtctcgtgttgaagcatactcagatggtacggttccattgcatacgcttcgtgctgacatcgactattcatgggtcgaagcacggacgacttacggtaaattaggtgttaagacctggatctaccgtggcgaaatcttgccagaaaagaaatctgctaaaggaggaaactaaacatgctggtacctaaacgggttaagtatcgtcgtgttcatcgtggtaaaatgcgcggtgaagctaaaggcggtaaaacagttgcttttggtgattacggtttacaaaccctcgaatcacactggatcagcaaccggcagattgaagctgcccgtgttgctatgaaccgttacatgaagcgtggcggtaaggtatggattaagattttccctcacaagtcctacactgaaaaaggtgtcggtgtccggatgggtaatgggaaaggtactcctgcaggttgggtagcaccagttaaacgtaacaagattatgtttgaagttgctggtgttccagaagaagttgcacgcgaagctttacgcttggctggaactaaattacctgttaaaactaagattgttaagcgtgaggaagtaggtggcgaatcagatgaaggctaaggaaattaaagcattgtccactactgaaatgctcgaaaaagaaaagtcttacaaagacgaacttttcaacttgcgttttcaattggccactggtcagcttgaaaacaccgctcgtttaaaacaagttcgtaagaacattgcgcgtattaaaactgcgttgcgtgaacaagagttaaacaagtagagtataaaggaggcaatcacgaatgagtgaagatactcgtaatagccgtaaggttatccaaggacgcgttgtttctgacaagatggacaaaaccattgttgttattgtcgaaacttacaagaaccatccggtatacggcaaacgtgttcgttattcaaagaaattcaaggctcatgatgaaaagaatgaagccaaaactggcgatatcgtcaagatcatggaaactcgtcctctatcagctactaagcgtttccgcttaattgaagttgttcaaaaagctgttattatctagattattagctgaataaaattacatgaagggaggacacttactgtgatccaacaagaaagtcgtttaaaagttgctgacaactccggtgcccgtgaaatccttactattaaggtattaggtggctctggtcgtaaaactgctaacattggtgatgtcattgttgctacggttaaacaagcaacacccggtggtgttgtcaaagctcatgatgtcgttaaagctgtgatcgtccggactaagtctggtgttcaccgtgctgacggttcatacatcaagtttgatgaaaatgctgcagttattattcgtgatgacaagactccacaaggtactcgtatctttggacctgtcgctcgtgaattacgtgataaggacttcatgcgtattgtttcattagcgccagaagtactctagtcacacaccgtaaataaggaggtgcgcaacctaatgttgattaaaactggtgataaagttcgagtaatcagcggtaaggatcgtggtcaagaaggtactgttaaaaaggttatctctgccaagaaccggatcgttgttgaaggtgttaacaagatcaagaaacaccaaaaaccaacgaacgttaacccacaaggcggtatcgtggacatcgaagcaccaatcgatgcttctaacgttatgtaccttgacccatcaaccaacgaacctacacgtttaggtgttcgtcgtgaagatggcaagcgtgtccgttacgctaaaaagtctggtaaagacttagaaaactaagactgactgaaaggaggaagcaagtttcatggaaaaccgtttaaaagctcaatatgaaaaagaaatcgttccagcattagttgacaagttcaattacacttcagtaatgcaagtgcctaagctggctaagatcgttttgaacatgggtgttggtgatgcagttaccaacgctaaaaacttagacgaagcagttgaagaattaactttgatctccggtcaaaaaccattggttacccgggcaaagaaatctatcgctggtttccgtcttcgtgaaggtatggcaattggtgccaaggttgacttacgtggcgaacgtatgtatgacttcttggacaagttgatcaatgtttcattaccacgtgttcgtgacttccatggtgtaagtactcgttcatttgatggtcgcggtaactacacattgggtgtccgtgaacaattgatcttcccagaaatcaactatgataatgttaaccgtgttcgcggtttagacattgtaatcgttacgacagctgatagtgatgaagaatcacgtgagttgttaactcaatttggcatgccatttgctaaataaccgaagggggttaatcgaagttggctaaaaaatcacaaattgctaaacaaaagcgcggtgctaagtttaacgtacaaaactacacccgttgtgaacgttgtggtcgtccacattcagtttaccgtaaattccacttgtgccgtatctgcttacgcgacctggcccacaaaggtcaaatccctggtatgaaaaaggccagctggtaaaaacaaacccaagttaaaggaggttaaactttcatgatgactgatccaatcgcagatttcttgactcgtatccgtaacgctaacatggtacgccacgattcactagaagttcctgcatcaaaaatcaaacgcaacattgctgaaattttaaagaatgaaggttttgttcgcgacgttgaatacatcgatgatgacaaacagggcatcatccgcgtcttcttgaagtatggtaaggacaacgaacgtgtaatcagtggcttgaagcgtatttcaaagccaggtttacgttcatacgtcaaggctgatgctgttcctaaggttttaaacggtttagggattgctatcatctcaacttcagaaggtgtcattactgataaagaagctcgcgccaagaagcttggcggcgaagtattagcttacgtttggtaatcattaattaagacgggaggtgcaagtaagtgagtcgtattggttataaagtaattgaactacctgctggggtagaagtatcacaagctggtgaagtcgttacggttaagggtcctaagggtactttaacgcggaacatcgccagtgatattacgatgacggttgaaggcaacgaagttaaattcactcgtccatctgatgactacaagatgaaggcattacacggtactacccgtgcaaatgttaacaacatggttgaaggggttactaagggctttactaagaaccttcaattggtcggtgttggttaccgtgcccaattgcaaggcaagaagttagtattaagcgttggttactcacaccctgttgaatttgcaacgcctgaaaacttgactgttgaagttcctgataacacgcatatcaatatttctggtattggtaagcaagctgttggtgactttgctgccgaagttcgggccgttcgttcacctgaaccttacaaaggtaaagggattcgttacgtcgatgaatatgttcgtcgtaaggaaggtaagactggtaaataatgcagcgtaaagctgtccatactaatatatagaggtgactattgtgatttccaaaccagataaaaacaaaacacgtcaacgtcgtcacgcacgtgttcgcggtaagatttctgggactgctgagcgcccacgcttaaatgtttatcgttcaaacaaaaacatctacgctcaagttattgatgatgtagagggtgtaacgctcgcaagtgcctcaactttagatagcgaagttaaaggtaacaacaagactgaaaaggctgcatctgtcggtgaagttgttgctaagcgtgctgctgaaaagaaaatcgttgacgtcgttttcgatcgtggcggttacttatatcatggtcgggttcaagctttggctgaagccgctcgtgaaaacggacttaaattctaacaaaggaggaataataccatatgactttcattgatccatcaaaattagatcttgacgataatgttgttgccattaaccggattaccaaagttgttaaaggtggtcgtcgcctacgttttgctgcattagtaatcgttggggaccacaagggacacgttggtttcggtactggtaaggctcaagaagttccagaagcaattcggaaagcttccgaagctgctaaaaagaacttgatcactgtaccaatggttggtaccaccattcctcatgaagcacttggtgtttacggtggtggccgcatcatgcttaagccagccgttgaaggttctggtgttgccgctggtggcgccgttcgtgccgtcatggaattagccggtgtggatgatgttactagtaaacgattaggctcaaacacccccgttaacgttgttcgtgcaacgttcgaaggcttaaagagcttaaagactgctgaacaagtcgctgctttacgtggcgtttcagccgaacatttagctgaatagggaggacaaacaacatggctcaattaaagatcactttagtacgcagtgctgctcaccgtcttcctaagcaacgtaaaatcgttaaggaattaggtttgggtcggattaatagttccgttgttaaacctgatgacgcagcaactcgcggtcaaattttccacatcgcacacttagtcgatgtcgaaatcatcaagtaattcaaattttcaaagaggaggtgcctactaaatgaagttacatgaattaacacctagtgaaggttcacgtttttcacgtcgtcgaattggtcgtggtgactcaagtggccaaggtaagacttctggtcgtggccaaaaaggtcaaaaggcgcgtggtaaagttcgtgtcggtttcgaaggtggccaaatgccattgtaccgtcggattcctaagcgtggatttactaacattaaccgtaaagaatatgcggttgttaaccttgacggcttaaaccgttttgatgatggtgccgaagttacaccagaatcattaaaggaagctggcttagttaagaagagttctgctgttaaagttcttggtaatggtaaactcaacaaaaagttaacagttaaggcaagcaagttctctgcaacggcggttgcagccattgaagctgctggcggtaaaactgaggtgatctaatttgctgactaccatgaagaacgctctcaaagttaaggatattcggaataaacttctgttcacgttgggcgttttgattgtatttcgtcttggctcttatatcacagttcctggagttaatgcacaggcacttcagtcggtggcatcttcagggctgataagtatgttgaatacattcagtggtggcggtttaacaaattattccatccttgctatgggggtatccccttacattactgcacaaatcatcgttcaattgttacaaatggacattgttcctaagtttgttgaatggggcaaacaaggtgaagttggtcgacgcaagcttaatcaagcgacccgttggttaacgatcgtcttggcctttgttcagtcgattgggattacggctggttttaactctttgagtcaactcaagctcgttaacaatccaagtatttcgacttacctgaccattggggtgatcctcactggtggggcaatgttgacgacttggatgggtgatatgattacggatcgaggaatcggtaatggggtttccattattatcttcgccgggatcattgcccgtatgccaacatcgatttatcaaatttatcaagaacagttcgttaatgtttcacagagcgactggtggaagagtggcttgtttgttgttgggttagccttgcttgtgctgatcatcgttatgtttgtaacgtgggtcgaacaagctaatgaccgaattccaattcaatacactcgtcgtgcagctggtgcacctgacagtagttacctaccattaaaggtgaacgttgccggggttattcctgttattttcgcgagttccttcattgcaacgccccaaacgattttgctaggattccaatccagtcatggtgacgaaacctggtataccgttttgagtaatatcttcaatatgcagtcgacgactggtgctattctttacaccattctgatcgtgctcttcacgttcttctatgcgtttgttcaggtcaatcctgaaaagctctctaagaacttacaaaagcaaggcagctatattcctggtgtttggccaggtaaggatactcaagattgggtttcaaaattgttaatgcgactaagtacggtcggtgccctctaccttgggttgatttccttgattccattattagcttctgatatttggggtctcgatgaatcaatcggtttaggtgggacgagtttactaatcgttgttggggttgcccttgaaacaattcgtcaaattaaaggattgatgatgaaacgtgactatgtcggtttcattcgttaatcagcgaatgtgttggggagactcaacacatttgtgcattcaggaggaaaaaacatgtcaacaatgaacctgattttaatgggattaccgggtgccggtaagggtactcaagcacagaagattcttgaagattttgatattccacatatctcgaccggagatatcttccgtgcagccattaagaacgaaacgaagatgggcttggaagccaagaagtatattgatgcaggtaacttagtaccagacgaagtcactaacggcatcgtccgtgatcggttagctgaagcggatactaaaaatggtttcctattagatggttacccacgtaacatcgatcaagctcatgctttgaaacaaatcggtgaagaactcaataagccacttgatggggtcatcaacattcatgttgaacccgcagtacttgttgaacgactttccggtcggtttatctgccggacttgcggtgcaacttaccataagttgtacaacaagcctaaggtagaaggaacctgtgatgtgtgtggcggtcatgatttctatcaacgtgatgatgacaagccagcaaccgttaagaatcggttagacgtgaacattaagttgaacacgccattaattgattattacggtcaagaaaagttactctacaatgtcgacggtgatcgcgacattgatgatgtctacaaagatatcaagaaaattcttgataacctgtaaaccaggttccttcagcagcgacgtttgcttttcaaaggtcgttgtgataaaattattcaggtttagccgttgactgatttaatatttttttaatgttatgattagacaatgactggttcagtaatggaccaaatacgtggtagcacggaatctgataataaggagggacagtacttggcaaaggaagacgtcatcgaaattcaaggaaccattaaagaaacgttgccgaacgcaatgtttaaggttgaacttgaaaacggcgctgaaatcttggcacacgtatcaggtaagattcggatgcattacattcgaattctgcctggtgacaaggttacagttgaaatgtcaccttatgatttaactaagggccggattacctaccgtttcaagtaggctcggtctacgtaccttataggaggtaaaaaactcatgaaagtaagaccatctgtaaagccaatgtgcgaacactgcaaagttattcgtcgtaaaggccgcgtgatgattatctgctctgctaatccaaagcataagcaacgccaaggtaaataatttaattaagttggaggtgaaatattaatggctcgtattgaagggattgacttaccacgtgacaagcgtattgtcattggtttgacttatatctacggtatcggtaacacttctgcacagaagatccttgctgaagccggcgtttcagaagacgttcgtgtacgtgatttaactcctgaccaggaagacaaaatccgtgccgttgtcgatggctacaaaactgaaggtgacttacgtcgtgaagtcagcttaaacatcaagttattgcaagaaatcggttcataccgtggcatgcgtcatcgtcgtggtttaccagttcgtggtcaacacacgaagaacaatgctcgtactcgtaagggtaaaaaggtcagcatcgctggacgtaaaaaataataataaaggaggttttcgaattttatggcaactagaaagacaacccgtcgtcgtcgggtaaagaagaacattgaatctggtgtggctcacatccattcaacgttcaacaacacacttgttatgatcactgatatgcaagggaacgccattgcatggtcatcagctggttcattaggtttcaaaggtagtcgtaagtcaacaccttttgctgctcaaatggctgcagaagctgctgctaaggcatcaatggaacatggtatgaagactgttgaagtcgctgttaagggtcctggttcaggccgtgaagccgctatccgtgctttacaagctactggtttggaagttagcgcaattcgcgatgttacgccagtgcctcacaatggttctcgtcctccaaagcgtcgtcgtgtttaatctgtgacgttcattttgagggcaaacttcattttgtacgcacaactactaaacaccacgcgttttgaaaggggtaaaagataagaatgattgaatttgaaaaacctaacattcataaaattgatgaaaacgacaactatggtaagtttgttgtagaaccgcttgaacgcggttatggtacaactttagggaattcacttcgtcggattcttctttcttctttacctggcgctgctgttactagtattcaaattgatggtgttcttcatgaattttcaacgattgagggcgtaacggaagacgttacagcaattatcttgaatgttaagaagattgcacttaagttggaatcagacgaaaccaagacgttggaaatcgacgttaagggtcctgctaacgttactgccggtgatatcattggcgatgcggacgtagaagtcttgaatccagacttaccaatttgtaccgtagcagacggggcacacttccatatgcgtatgaccgcaaatactggtcgtggttatgtttccgctgaggataacaaacatcgtgaagatgacatgccaattggcgttttagctgttgattcattgtattctccaatcgaacgtgtcaactatcaagttgaaaacacgcgggttggtcaacgtgatgatttcgataagttaaccttagacgtttggacaaatggttcaatcactccaagtgaagccattagtctatcagccaaaatcctgactgatcacctttcaatcttcgtaaatctcaccgatgaagctaaaaacactgacgtgatggtcgagaaggaagaaacgcataaggaaaagatgttagaaatgacgattgaagagttagatctctccgtccgttcatacaattgcttgaagcgtgctggcatcaacacggtccaagaattaactaacaaaactgaagctgatatgatgaaggttcgcaaccttggacgcaagtcactcgaggaagttaaggcaaaattagctgaccttgggttatcattacgcaaagaagactaatacaagggaggatatccgttcatgagttaccgtaaattacaacgtacaagttcacaacgtcgtgccttattacgcgatttgacaacgtcattgatcgttaacggcaagatcgaaacgaccgaagcccgtgctaaggaagttcgttcaactgctgacaaaatgatctctttggccaagaagggtgatttaagcgcccgtcggaaggctgccgcattcatgcgggacgtcgttgccgatgttaaggaagatggcgacaacgtggctgtacaaactgcattgcaaaagctatttagtgacttaggtcctcaatatgctgaccgcaatggtggttacacacgaatttacaagactatgcctcgtcgtggcgacggtgcacaaatggttgtcttggaactcgttgactagttaagattgttttacggatcactgggactgatgattgacgggcgttatgatggtggctactggcaaaatagtagctaagtctagttcggaagttatttatggttagacatagatggcatatcgcagttctaagtgattttttttggtgctagttacgagcaaccgctgatttagggattgattccctaaatcagcggttttttgttggaatggataggtgtttttaatactcgtgatgacaacggtttgttatttgcagattatgacctgttgaatcgggaaagtggatatagtggtctcaggtactgactgtgaagatgaagcacatgggcgtttagctgtgtctgggcgacaaaaaaggtatcaaacaggatgcttgataccttagtcgattgattactagttaattatgccggtccaacagccgtttggttagactaatcagatccgtcttcgcaggctggtctggaagtttacgcatgattgccagcgcgtcttgagtgtacttggtagcgagttcttgggcttgcaccacaccgccggcattgatgacaagtcgttgtacttcctggcgctgagtgtccgaaattgccccctgtagtcgcatcagcggcaataaatcgtgcttagcttctgtctgtaaggcaaaaatcaacggcgaggtgtagacaccttcagcaacgtcttcgaggatgggtttgcccgtttcctgactgacttcttgatagtctaaaatatcgtcaagaatttggaaggccatcccaattgcgagacctgctttacgagcgcgctgggcgaaatgactactttgaccagattcataagcacctagaaaacaactcagtgcgaataactcggcggtcttaccttgaatttgttgcaagtattctgccatggtaatgtcaaggtggtagtggcggtccttttgttggacctcgcccactagaatcttttccatgttctcagagttcatctggatgcttttgaaactgcttgaatagtgcgctagaatcttgaataccacaacgaataggtagtcgcccgcatacacagcagtatctttaccaaaacgttcttgaatcgtgacatggtgccgacgtagtgcagcatcgtcaacaatgtcatcatggatcagcgtagcggtatggagcgtttctaatgacgccgctaaggccaccatccgttgccgatcagttgttgtaaattgtgagaataggaggcagtatgccgggcgtaagagcttaccaccaccatgaatcatttctaaaatcgcgtcattgatgtcggcatcttgaatattgatgttcgccgtcatcagctgcatcacttgttgcagctccggttgtagtgccgggtaatcacgccaaattgggtgtaattgtgttgccgattgcatatgggttactcctttgtttgatctggatggtgttctcgattgaatttgagatagcgtaagatcgtgacgtgggtgaacaagtagttggcggcgattccgagagcacttcccgctgctagtccaataatcgaaagcactggcaagtagagcatgaccgtccacgtctgtgcaataagactcgcgaccaatagctgaccaacattatgcataacgccaccagttgctgaaattccaataatactaacgcgtttaggccctaattgtttgaccaacagcatggcaaacaggctgagaaaggcgcccccaaaactatacagaaaggttgataaagtgccacctaggagggccgttaaaatcaaacggagccaggttagggttatcacgtcagttaatgataatgtatagattgcaacaatggtaatcagattggctaaaccaagcttggcacctggggcaaaggcaaacgggaatggaatcatccgttcaaggatgccgatgatcacgccttgtgcaaccagtaacgcgatataaatattacgatgagttttgtttgatcgttcaaatgaattattcatattctactccgtaactaaaccattaccgccagatttgacttgaccgttgctggccttaatttcaaccaagagtttgtggggcaaacaaacaatcgtttgaccaggtttatgaatccagcctcggcggacacatacttggtcagaacagttggctttcgtaatcgcaacgcgcttaggtttaaatgtgatcgtgttgtagtgcccatggttatcgcgataggtgaagtgcttagtcgttttcagattcgtaatattgacacgcttcaagacggtcccattatgtgagaccacggcgttatacgtggtttcactgctcgtggcctttcgcttagccactagtgccgcatgttcagcttgttgtttttgctggtatgaaaaaatcgctagtggggtgaacgataaaataattagcgcaacaataataataatatcaaacggcttgatcatatccccataacgtttgaatgtccggatcattgtccgtaatttacgcatcgttaaccctccaattcaatgaaataaaaaatggttcaaggggggaaaaacaacccttgaaccatcgggaaaggatttaattaattataacgcatctagcgggttttaacaccgtcgtaatgagaacgaacgttgccgtaccaccagtgtccaaggtgtttttgcatccacggaacgacccagtagtctaacccaaatgtccgtccggaaccgttcattaaggcgagggcaacaaagatcatccaaatgttgacccagtagaacatgccagataagcagaagacgacaactaagccaatggtgactgcgttagcaaaccaagtaaagagtccgaagaaaatacataatgcaatgacgatttcaacacaagtcatgaatttctggaagaagagggccatttgcatgttcggaatgaagaccttggtaattgattcgaaccaatgtggcattttgtcaaagaccatcaggggttctttaccgtacatgtatgaaagactgaagacacccttagcggctttagcggttgacgtggcagcttcagaagcaccactggttgcagcggctttagttgcttgagaggcaccactggttgcggccacggtaatccattcgaatggtaaccgtaacttgtcagtgaaccaggattcagatccctgaactttagtccagcagtcccataaccacatggcaccatagaagaaccgcagtggcacactccagagtacgttaccagcccgtgagacccaaccgcggaagacgttacggttattacgagtccggaagaattcgtgcatgaagtactggaataggtagtaacctgagaaaatctgaacgtagtacatccagttgatggcgtgttttaaaagcacggcaataaaaccagagacgttccacttctctaaaacttgtgcaacggcatatttggaaccaattgagtcgacggatgcttgataagcgcccttaaatggcttgatcgtaacgtcagtctggtcaacgttcttaataataccttcgacggccttagctgcggtttcttcagccccttgaacgatttgtgggactggccgtggttggtcaggttcttggtagctggttgaatcaccggctaagaagatattgttacaatccttagcttgcatgaattcattggccatcaagcgaccaccgcgggggttagtttcaatgccgaactttttaacgatactattagcacgaacaccggctgtccagattaacgtgtaggttggaattggatccttgccttttaagttaacatggtcttcacagacttcggtaatcatggagttcgtcatgattttgacaccatgtttttccatgtacttagcggccttaccggcttgcgtccggttgagcatgttaataatagtcggcgctgcttcgaccaattggagcgtgatttcacttggatcgagcttgttgtctcgagccaaaacatcacgatattcgattaattcaccaatcagttcagaaccagtaaaaccagaaccacagactgtaaaggtcaacatggctttgcgcttagcagggtcgagctccgccgccccccgccgaataattgcagataagtgagcacgcaatgccatcgcttgttcgaaggaccacaattcgaagccgtgttccttaacaccgggagtcccaaagtcattggattccccacccaaactaattaaaagttgatcatattgataacttccgtgttcggtagtaactgtttgtgcctttttgtcgatgcccgtcacggtatcggtcacgagacgaacgttttttcgccgtgcgaacaaccgttgcaaatcatattggatatgctcaggttccacccgttcggtagcaacttcatgtaattcagtcatatacgtgaagtatgaatgccggtcaatcaacgtaatctcgacgtctgcattttttttgaaatgcttagacagtttcttggttgcgtaaacaccagcaaaccccgcaccgacaacgacaatatttttctttgccattgcgtaacaactcccttgaataatagtgtaaaaagataattccactaataattataacgataatgtaagcggttgtctatggattatgggaaagaatgcataaactatcacattatctaagccgcgaaaatagtggcatcgaggtttgaacggaaaacgttgtcaataccgctattattaggctaaaatatcatttttttaatggaatgggattgactattaccagtttaaacgttaagattaatgtgaattttcatacaaaaaggttaggagtgggatatcatgaaattcaaatcagttattacgggtgcttcagttgttgcaatttcagctttagctttagcaggttgtggcagcagttcttcaagttctagctcgagttcatccaagaagagttcatcttcaagctcatcagctaagacaactaaggttgctaaattaaccgctggcagcaaaatgaaagcgggtacttataaccttgaagaagaaaattattcacatggttatcggaccaagatgagtatcacagttaataacaacggtaaaatcactaagtccagttatgaccaagtgaacaagaacggcaagtccaaagttgatgatacttcatataacaaacaaatgaagaagatcgctgggactaaccccaagacttacatgcctaagttaaacaagacgctgacgggctctgccgctactggtaacgtgggctccattgatgttgtgactggtgcgactgaatcatcaaagaccttccaaaactacacacaacaattagttcaagctgcccaagcgggtaacaagtcgaccattaagattgacaatggtgccaagatgaaagatggtacctacaagttgaacgaaaagaactactcacacggttacaaagttactttcgcaatcacggtcaaggataataagattacgaagtctgaatataaccaagtgaacaagaatggcaagtccaaagttgacgatgcagcttacaacaagcaaatgaagaaggttgctaagactaaccctaagacttatcaaccagctttgaacaagtcattagttaagagtagtgatccaactaaggttgacgttgtcacgggtgccactgaatcttctaacacctttattatgtacgcggaacaattacaaaacgcggcacaaaagggtgacaccaacacgattactgttgacaacatgattttctctgaataagcaatttaattattagattcttttgaggcctgaggcgcatgctgagggccttttgtttttaattgaacaaccacaaaagtttgtcactcagttgggcacgactttgagcaagctaaatccatacatggatattggtttaaaaaataatagtggcggtgaatgttaagtgcaaaatggctgtggtaatacaaacccgaccgtcgagttgtaccgtttgctgtaggtgcgctgatgtcagactagcgtagaaaagcttggatgacgcgcaaacagtctcaccggatgaatcaagactttggtataatgacaattgaaattaaaaataggggaagtattggaatgaagctaaaaaaatgggttcgaattggattaattgttgcaatgatcgtgccattgacggcgtgtgggacgagtacgagtcgcaaaaatgctgctagtagccgacccaaaccaactaaggtcgtcaagacgccgatcgaggatacccagttcatgatgggcacagttgtcacgttgcggatttataataagggtaaggataacgtgttagctggggcgtttaagctgttgaaaacggaagctaaggaaattacggtcaatcaaaaaggatctgaaattgataagatcaacgccgctgccggtaaaaagccagtggctgtcagcaaggatatctacccaatgatcaaagcagcttactattatagtaagaattcagacgaatcctttgatttagccattggtccgatcacatcactctggcatattggattttccgatgccaaggtgcccactcaacaagaaattgataagaacgttaagctggtagactacaaaaaagttaaattaaatgacaagaaacggaccgtttatctagaagaaaagggaatgcaactagaccttggtgggattgccaagggttacatgaccgatcaagtgaagacgtacttattaaatcatggggtttcaacggccattattgacctcggtggtaatatttatgttctgggtgacagccctaaaggaacgaagtcaggtaactggacagtcggtatccaagatccaaaagcgtcacggggtacggccattggctcactacctgctaagaataagtcaatcgttacttctgggatctatgaacgctatttgaagaagaatggtaaagtttacagtcatttgatggacccacaaacaggggcaccttatcaaaacaatttgatgggcgtttccatcatctcgaagaagtcggtggatggcgatgcactatcgacggccacctttgacaaaggcctcaaaggcgggatgaagtacattaatggtaaagcggatcaaggtattggggccatttttattaccaaggataaaaaagtatacgtctccaataacttgaagaagcagttcacgctgtttggcgatgctggttacaaatacgggccagccactgatttaaagtaagattggacgtgaagttcagttactacaagttccgtcagatatgttatgataataaccatgaattttaaggaaatgagggacaatggtgagtccgattattgacgttaaacatttagattatcgttacccgcaacaagctacggatcagttaacgttacacgatatttcatttacggtcatgccgggtgaatgggtcgccattgtcggccataacggttctggtaagtcgaccttggccaagaatttaaacggactgttagcaccagcggccggaacgattacggttgatggtcaagtattatctgaagaaaccgtttgggacattcggcgcaaaattgggatggttttccaaaacccagataaccaattcgttggggcaaccgttgccgatgatgttgcgtttagccttgaaaaccagggcgtgccgcgtcctgagatgctaacgcgggtacaggcggctctagaacaagtcaacatgcaggattttgcgacacgtgaaccggcacgtttgtcaggtggtcaaaaacaacgggtggcgctggctggtatgatagcggcgcggcctcagattttgattctggacgaagcgacgtcaatgttggatccccgtggtcgtcaggaagtattgacgacgattcgcgatatgaaggctaattcagcgttaacggtcttgtcaattacgcatgatattgacgaagcggccagcgctaatcgggtcttagtgatcaatgacggtgaggttaaggaagaggggactccagcggaaatttttcagcatggagaagccttaattaagatgggattggacatgccatatgctgagcgcttaaaagcagcgctaaagcggcagggtgttcaagtgcccgcacagtatttaacagagaaaggaatggcggactggttatggcaattacgttcaaacaagtagattttacttaccaaccgggtacgccgttcgaaactaaggcgttaactgatattaacgtcaccattcccaccggctcttatacggctttgattggtcatacggggagtggtaagtctacacttttacagcatttgaacgccttactcaaaccgactagtggaacggtcacgattggtgaacgggtcattacgccaacgacgagtaataaggacttgaagcgattgcggcaacacgtgggcatcgtctttcagtttccagaaagtcagttgtttgaagaaacggtggccaaagacattgcgttcgggccccagaactttggggctagcgaagcggatgctttgaaaactgcggctgaaatgttggctttagttgggttagacgagtcgttactgacgcggtcaccgtttgacctctctggtggacagatgcggcgagtggccattgcgggggtccttgcgatgcagccacaagtcctagtcttggatgaaccgactgccggattggaccctcagggccgtttagatatgatggagatgtttgcccgtttgcgtcatgaacgtgatttgaccgtggtactagtgacccatcagatggatgatgttgctaattacgcggataatgtaatcgtgatggatcgtggacaaatcgtcaaaacggggacgcctcgtgagatcttcaaagatcctgcgtggctaactgcccatcaactgggcttaccgaaaacaacggcctttgcgcatacactccaaaagcaaggctggcaatttgatgagtggccgttgaccgaggacgaattagcagcagccatcgtccaacagttgccaccgaacgcgatgggggaggtggccgctcatgatgaataaattgatctttggtcgctacattccgggagactccgtggttcaccatatggacccccgggcgaaactgttattgagtttttatttcattgggattatttttattgccaataactgggcgacctatgccttgctatttgtctttacattggccgctatttacctatccggtgtgaaatggtcgttcttcatcaacggtgtcaaaccgctgatttggttgattttattcaccgtcatcctgcaagtgttgtttagtgcaagtggcgggcacgtttactttcaatggggcatcattacaatcagccaacttggattgatcaacggggtctatattttttgccggttcgtgttgattatttttatgtcaacgctgttaactctaacaacgccgccactggaattgtcggatgccatcgagtatatcttgatgccgctcaaagcggtccgttttccagtctatgaagtggcactgatgttgtcgattgccttacgctttgtgccaacgttgatggacgaaacggaaaaaattatgaatgcacaacgggcccggggggtcgactttggtgagggcaatatctttcaacaaatgcgtgccgtagttccgctgctgattccgctgtttgtcagctcattcaaccgggctgaggatttagcaacggcaatggaagcacgtggctatcaaggcggcgagggtcgcagtaagtaccggattcttaagtggcaccaacgtgatacgtgggctaccggatgctttgcgatcttgaccgttgcattgattttcttgcgtgcataaatgaagactgattaacgtgggcgtcgcactgatggcgacccacgtttttaactggagggatattgtgaccacgcggtataaagtagttttagcatatgacggcaccaattttgcgggctttcaacgccagccacaccagcgaactgtcgagcaggtcgtcactaaggcggtcaataagatggcgaaagatcccgttgaaccgattgtgatctacggcgcgggccgaacggatgctggtgtgcatgcgtttggacagacgttgcattttgacttgccgtacgaaattaatccagaaggggttcggcgcggcctgaacagcatgttaccgatggatacaatcgtaaaggccgtttccattgtgccgaatgattttcacgcgcgttatgatacggtcggtaagcggtactggtatcgggcctatcaaaatgaatttgtagatccatttaaacggcactatacggggcattttaagttcgctgcggatatcgaccgaattcagcaagccatcggtgacttagaaggacggcacgatttctcgaccttcgttgcgtccggttcacaagcacatgaccatgttcgtgagatctattcagccaaagcgtgggccttgccggatgaacgcgaaattcagtttgaattttgcggtagtggttttttatataaccaggttcgaatcatggtggctgttttgatggaaattggtcagggccggcgcgcagttgactgtattccagcgttactagcggctaaggaccgtgagcaagcgcggggaacggctcccgcggctggactttatatgaaaaaagtgtattatgaacaaaatgaattacaagctgatttgataaagtattgacttctgaggcgaaattaggtagactagtcgttggtattgtttgccccacgataagccccggaaatcttattgagtgtcaaacaaacacagaaaatggaggaacacaacgtgcgtacaacatatatggctaaaccaggtgaaattgatcgtaaatggtatgtagttgatgcaaccgatgtacctttgggtcgtctttcaactgtcgtcgcatcaatcttgcgtggtaagaacaaacctacctttacccctaacgtggatactggtgataacgttatcgttattaatgcaagcaaggtcgctttaactgggaagaaagcagaacggaagatttattatcatcatactgcttatgctggtggtttaaaggaacggactgccggtgacttcttggcaaaggaacctactaaattgattgaaacttcagttaagggtatgcttcctcacaactctttaggccacaagatgggcttgaagttgcatgtttatgctggtgcagaacatacgcaacaagcacaaaagcctgaagttttggacatcactaacttaatctaaggaggaaactacattggctcaagtacaatatcgcggcacaggccgtcgtaaagattcagtagcccgcgtacgcttagtaccaggtactggtaaaattgttatgaatgacaaatctgttgaagattacattccatttgcagatattcgcaaggaattgttacaaccattcgaagtaactgaaacaactgatcaatatgatgttttagttaacgttaatggtggtggcttccatggtcaagccggcgcaactcgtcatgggatcgctcgggcattgctcgaagttgacccagatttccgtactcctttgaagcgcgcgggtctcttaactcgtgatgctcgtatgaaggaacgtaagaagccaggtttgaagaaagcccggaaagcttcacaattctcaaaacgttaatattatccaaaaacgttgttttatcaacattttctggctatatgagaaagcacctgtctatggacgggtgctttttttttggttgagtgagaaaaaaaccacaaaaaaaccatatgacgtggctcaacgagataaataacccatttgggcaggttttatttgatactaattggttcgaatatagcccgccttgaaacaaactaagcaagtaacgctcggttacttaaaaatggattgggccattgacggctcaatccattttaattactgacgtttagttttaccaaaagagaagacggcaacgcaaccgaggccggtatggctagtgatggtcggcccaatgtgttcgagcaaaatttcagcatcaggaaccttggctaaaatcttttcacgaacggtttgggcggcttcctgagcgtcgctagtggcaatgataatgcgcggcttggtctgatcacgtaaatcggctagtgtgttgttaactagtgtggtcagtgaccggcgccgtgagcgcaccttttgtactggacgcaagtggccgagtgggtcgacgtccatgactggcttgatctgtaagagtgatccaaccgtcgcggaggtccgtgagacccggccgccgtgataaaggtaatttaagtcatcaacggtgaaccattggtgataatagaggcggttttcagtcagccaatccgccaattgggcgatcggcataccagcatcgcgcttgtcaatggcatctagtagcatcaggccttcaccgcagcaggctgctcgggaatccacgaggtagatctcggcatctggctggtcttgtaaaagcatggccttggcctgttgcgcattattgaaggtcccacttaagcctgatgaaaagccgaggtataggattggcgtatgtgcctgaacgtacggcttgaaaaattcaataaactggccgatattaatctgagcagtagaaggcatcacaccgttaccaatccgatgataaaagtcagtcaagtcaaagtggtgacccaaatcgtccgcgtattcctggtcgtcaatcgtgacgttcattgaaacaaaatcgacatgcttgtctttaagtagttgataaggtaaatcaacggttgaatctgttaatagctgatacatagttttctcccttaattgtacttactgttacattgtacgcttatttgggcggccatggaaaattaatacatgctgtatttttacgtacagcagtaatttacggtaacaactagttggttgtcgcaatcctggtagcagcgtgaatgctgatcaggaaattgaactgggcatgtcagtaaatactggacgcatcggaaggtcagttatgggttaactgcaataatggcgtagtgactaggaccgtgcttttcagtcatggtgatgaggttcgacgactaatttgcctattcaatgaggcgctgtaagttgattgaaatcagccgatcaatggcgtgattttgctgctggcggtagggggtggccccggtttcataaaggagttgcgcctggtgatgatgaacgctgatctgttcgagttgcggaggcaatcgaagaatcgcgataccggtggtcagttggtgctgttgaattaattggctgcgcttgaatagcagtaagtgtgaggcgctggggccgtatgactgtgataacaagacgtagtggtcatagaaggccattccttgaatattgggtgggagcttgccgtgccagtcactaactgcctttggtaaaatggcgtgactcgtggtcattctgtatggcgtgccggcgctcgtcagtggatagcgggcaaccaaggtggtctgtccaggtttgaactggccgacataaagggcctgatggtgataggtcagtagtgaagcattgctcagtgttggcagtgaccagcgttgctgatagtgaacggcaatggaagtggtcgggtcgaagtgccgtaatgcggccagactaacgctcacgatagccccatgaccgtggcgatgactgcacaaccaaatccgctggtggtgagggtcataagctagaccacccacatgtggtttaccatgcaataagacagtgttgcataattgatgtcggaaacgatcctgtacatataggacagattgggttcgaccagtggcatcgtaagcggtggttagacgataacgaccggcaataacaacgccctgtggaatcatcattgtcgtcgtcgtgagttgtttagtgacgaggtctctagtcagggtggcttgtagtcctggctgaatggtggtgccttgcaacataccgattgggtcgaattttgctagtttaaccagatccggatactgacggatggtttgataaaattcggttggtgaaaaaacagcttgggtggctgttctttgaagggtggttggtgggtacggtagtgtcggtcgtacgcgactagctagaccgccgaggggatggacccaaattaacaagcccgtgattagtcctgtataaaaatgataggtataacggtgcatcgcgggtccctcctctagtttaagtgtcttcaatatagcatggaaagacaggccgcttagcggatagtgaaaggttagttaaggaaagaaactgagtggggcataattaaaaaattaacgttttgcacatctgtttttaattatatttacataaaacattgaattttctaattaggaatcggataatgaacgtgttcaagctgtttagcaatctgaataaagtgtgatatcccggtgctcgccaagttaggcgagtgctggctgtcaaaaacggaggaaaatataacgatgcgaattagtgcggaaacggaacgacaatttttagaagcagtttttaaggcccaacggtttagtgccaaggatggggcactgctggcagacaccctggtcgatgcagatttacgtggaatctcgtcacatggtatccagcggctggcttggtatacgcggatgatcaaggatcataccttggaaccgacgcatcaaccgaagattttgaatgaaacacctaccagtctattgatcgatgcgaaccagagcatgggccagattgcgtcggcgtttacgatgaataaactgattgaaaagactaagcaactcggtgtttcattagcggttatccgcaattcgaatcactttggaacggcgggctattattcgcgcatggcttgcaaagcgggtttgatcggtatttcaacgactaatacgcggccgttggtggtgccgacgaatgcgacagaagcttttttgggttccaacgcattagcttttacttttccagccgacccgcatcctttcgtttttgacggcgcgactgcggtggtttcaagcgggaagattcaagtgctggccaaaaaaggtgcacagattccgggtgattgggcggttgatgagcatcgtcaagtcttgcatgatgcgcagacggtggaggataacttgactaaaattgcgttttctgagaatcgtcctggtggtggggtcctgaccctaggtggccagcaggaagtcaattcaaattacaaaggctttggcaactcactaattattgagttactcacgggaattttagcgcaagggtcgctgtcggctgatacgaacaccggtaagcatgactttagtcagttcttcatgacgattaatcccgccttatttggcgatcccgaggtgttgaaggccaacgtgacgactatgtttgaccgtattcggcatttgaagcatctaccaggtactaagatcatgataccaggtgaccgggaataccggcactatgatgaaaatttggtgcagggcgtcagtattgatccacagacgttgacggaaatgcagcaagttggtgctgaatttggagtggcagtccccgcagccttgaaagcgtagtttggtgtagttgcggcaattattgtgactaaaatggggatcacataaactgatgatagtgtggctggaatctgctctggatgctggcgacactatttttggttatcacgattatgtgcggtggtgaagaccagctagctggttgggaatagatggcggttcagacaattgacgagcggcgacggttagttatacggaacattgttgaaattgtaatcgaaaataaccgtttgtcagtcgttcgttgtgagaagtttagcgttggagtgcggcttttagattttaatgatttgcctggcggtggattataagttaagtcagtgcaagctactggctaaaaatattttcagaaagtggcagggaaccattttaatatctgtaaaatgatttgacacgcaaacttgctgatttaccagtatttattagcagttagcgaggatgatgacgactagcaaatcgagggtggaccaacatgtttttgttgattaatagaaaaagtttgcaaaaaccatttgacaattctattgattagccgtatattttaagtcagcaaatacacattataaattaaggagattttaatcatgacgattaataccaatttacaattgaattcgtattattattactggtttacttagtgccttggcatccactgcgaggcacgccctcgcaacggatgtgaccagtaaattttggaatgattaaaatttatggaaaagtcatatcagtgttgtgaacaaccactgtgtgacttttctgcttctgagtagcggtgtttttcgggcaccctgcgaagaattagtggactcacagttggtgtaactgtgagtcttttttattagccaaaatgagagggagcgaagttaatgcaagcatttgatgaaattgatgaattagcggtgaataatctacgagtactgagtgcggaaatgattgaacgggccggttctggtcatccaggattgccactcggcgcggctccaatgatgtgggcactgtggagccgacaattacgggtcgatccacagcagtctcaatgggctaatcgcgatcgctttgtcttatcagccggacacgggtcggcgttgttgtacagtctgctacatgtgagtggcttcaacgtgacaatgggcgagttacaacgttttcgtcaattcggcagtcacacgccaggccaccctgaactgggaatcgtggatggtgtggaagccacgaccggtccactgggacaggggttagggatggcggtgggcatggccctggctgaacggcaactagcggctcagttctccgaggcaccgcagttggtggatcactatacttatgcgttagtcggtgatggtgatttgatggaaggcgtctcccacgaagccgccagctttgccggtaatcaacaattgcaaaaattaattgtattgtacgacgataacgctgtttcgcttgatggccccaccagccggtcgtttcgtaccgatgtgaaccagcacttcgctagttatggttgggatacacaaacggtaggtgatggcaatgatttaacggcgattaatgccgccattgagcgtgccaaacacagttcacgtccaagcctgatcgctgttaaaacgacgattggatttggcgcaccacaagcgggtacgaatgcggtgcatggcaatccgttgggaacggccggtttaactagtttgcggcaacaattagggtggcaagccgcgccatttacggtaatgccggccgttgctaaacgcgcacagcaactaatcttgcaacgtggtcagcgtgcacattgccggtggcagtcacaacgagaggctttaccacaagccgtacaacaccgtttcgaacaacagctcagtatgcgtctgccagttgacttagccaccagtttaccgatctttgatgaaggcgcccaagcttcgcggatcacgagtcataccgtcattcagaagctagctgctcagttaccaggattagtcgggggcgcggctgatttagccagttcgaataagacgaccattgagcaggatcaattgtcgactccggtgaccccggatcagcgcaacgttgcctttggtgtccgggagtttggtatgggcaccattttgaatgggatgactttacacggtggcttgcgggtctttggtggcaccttccttgtcttttccgattacacgcgtgcggctattcgattggcggcgatgatgaagttaccagtcacttacgttttcacgcatgactcgattgcagtcggcgaggacggtccgactcatcagccaattgaacagctaatgagtttacgattgattccgaatctaacggtgatccggcccgctgacccgaatgaaacggtcgcagcttggtggcaagccatcaacgcgacggatcatccaaccgtgctcgtcttgacccgtcagaatttggcagtgctatccggatctaagactaaggccatgactggtgtggctcgtggcggttatgttctctcaccgcagcgtggccgccagccaatgggaatcttgattgcaagcgggtcagaagttgctttagctcttcaggcccaggcgaaactagctacgttaggtgaagatgtcagtgtcgtttcaatgccgtcgatggaaaactttgcgcgccaatcaacgaattaccaagctcaggtcttgccacctcaaattcggcggcgagttgcagtcgaaatgggcgcaacatctggctgggaacgttacgttgggttagatggggcggtactaggcttggaccactttggcgccagtggagcggccgaccaagtattagccgctaaccagttcacggtagcagacctagtgcggacgtatcaacaaacgcacgtggatcttggtcaacaattgcgagtcatttagaaaggaagttagttaaagcatgattgatggacaaacggcactctttggatttatcgcgcaccccgcacggcacagtcgctcaccgcgaatgcataatttgagttttgactactgggggctaaatgcgcgctacttggcgtttgatgtggcaccggatggattggctgatacgcttgctggaattcgtagcatgggtatcgcgggggtgaacctttcaatgccatacaaacaagccgttgtaccgctactagatggtttgacagtgcgagcgcaacggattcaagcggtcaatacgattaagaatgaagctggcaagctgattggtgacagcacggacggcgctggagtttttcaggatctcttacatcaaggtctgaacttggttgataagcacgtcatggttttaggcgcgggaggcgcaggtaaggcaatcattgcggcggctttagattatggtgtcgcgagtgtaacggtctttaaacgcaacaacgtacgctacgccggtgttcagcactggttggagcaactcagtaccacgacttcggtaccactccggctctgtgcctatgaagatcaagtacggatgcagcaagttgctcgtaccagcgatttgatcattaacgcgaccaatatcggcatgacgactgctggaacgccattaccaatctcaattatccagcaattagtcccacaacagacggtctatgatatgatttaccaaccgcttgaaacgacttttttgcgcttagcgcgtcagcaggggtgcgccacatataatggcttggggatgttaatttggcaaggtgccttggcttttgagttttggactggtaagcagatgccagttcaacaggtccgccaagatatgttagccagtattcaagcgactccgccgattacggcgcaggcttaggccttaacttttgagaattgattagtaggaggaaattattatgattattatattaaaaccagcaaccgctacggctatgcaggcaaagttagtgagtcaatttggtgcggatcacgagatcttcacgcacaataatcgaattgcaattcaaggattgcgtccagaagcacttcccgcggatgtgcaagcagccagtgaatcaatcttgacggcagttcccgcagcggtccaaagcagccgtctctttcacccagaagatacgattattaagacgccacacagtgtgattggcggtaatcaattcgtcatgatggctggcccgtgttcagtcgaaagcgctgaacacgtggaccagatggccgcggttgccaagcagggtggtgcgacgattgttcgtggcggagcattcaagccacggacgtcaccttacagcttccaaggcctcggggagacgggactccaatacttacggacggcggctgataaacatggccttgatatgattaccgaagtgatggatgatgaacacgtggcgatggtggcgaaatacacggatatttttcaaattggtgcacgcaatatgcaaaatttctcgttgcttaaagccgttggacagacccaaattccggttgcattaaagcgaggaatgtcggcaacaatcgacgatgtgctcaatgcagctgaatacattgcagctggtggtaatcatcagatcatgcttttggagcggggaattcgaacgtttgataataagtacacacgcaacacgtttgacttaggtgcagtgccagtcttgcaatcgttgacacattacccagtcatcgttgatccgagtcacgcggtcggtacctgggaactcgtgaccccgatggcgatggcaggtgtagcagctggcgccagtggcatgatcgttgaaattcatgaccagccaacgcaagctttatccgatgggccgcaagcgttaaaacccgcgacgtacttaaaaatggcgcaacaggctttccagttacatgatctgatgcaaacgtgggcgtaggatgtgcctatgacaaacattgaagtcaagacgcgagttaaacagtatcagatcaagatcatgattgacagtttacatcatctaggaacgttggtaactaaggtatggtgtgcccgtcaagtagcggtggtaacggataccaatgtgggcccgtactatgcgaagctggtaactgatgaactgacggcggctggattcaaggtgcgtgtgatgacggttccagccggtgaggcgagcaaaagttggtcacaagtccagtcgttaatcgatcagctgagtgccgcccattttagccgcagtgacggtgtcatcgctcttggtggcggggtggttggtgacttagcagggtttgtcgcttcgatttatatgcgcggtattgccttgattcaagtaccgacatcattattagcgcaagtcgatagttcggtgggcggtaagaccgcgattgacttaccaactggcaaaaacttagtgggcagtttttaccaaccagatttagtcgtcattgatccggcaattctggtgacgttaccgccgcggatgctcgcagaaggttatggcgaaatcgttaagtgcgcagcattagttggcggtgatttttggcaatccttgcagcaaattaccagtgtggcagcgattttaccagcagcaccagatttaattgcagctagtgtggcgttcaaagcgcgcgtcgttatggcggatgaacatgaacagggtcagcggcaattattgaattttggtcatacgattggtcacgcagtcgaactattggctgacggtcaactaatgcatggggaagcggtagcgattggtctagtacaggtttgtcggttgtttgcagcacatgggttagcgccgactagtttaacgtcgacgctcaaggcacgcttaatggcggtagggttgcccacggaattaccgccgatagcgccgcaagccgtggccgcagtgatgcaacacgacaaaaaagtgcacggtacagcgctgacctgggtctacttatcggcggttgggcaaccccacctgtatcccatagcggtcacggacttggcgacttggatgggtgacttgtggtcggtgtcgtgattagacgtaagtttacaatatgcttcagttcgacacatgacggttagccgggtgggatctgaaaatttgagggagcatcagaacttttgacgtccaggttctgatggacttacatggtagattaacaatcggctttccaagtaatagttggaaagccgattgttattggttagggcgtgatgtttgtatgatcaagtcgttagtcaggagtaagttcacattgtgcgcgttaattttcatgaagcatgcattaaaatatgccagtcttgagtttaaaaagccagtttagggtcaccggcaaaagttctgatttgcgtaaacttgctcggctagatcgtccttcccccagaaatgggcactcagcccggagtcgggaaatacgtgaatgagtgtctgaacctgtcaaatggtatagttgaaaaacaactagtttaccaatagcctaaaagtttcatccagagtgtgccaccaacgcctcatactaatagatagaaaccaccaaggcacagattcagacgccaccattcggactgcgttatgtaacctgatccgaacataatcgaggcgggaccgttggcgtaatgggtggtcgaactgaaaatggcaccgtcaaagcctaatagtagggctgctagcattgggggggcgccggctgaaattgccacacccaagaaggcgccgtacatggcggagacgtgagcagtggcgccggcaaacaggtagtggctgtaaaagtaaacgagcatcaaagctgccaagacccatagccaactgattccttgcagggcctggcccatagtttgtgaaagccatggaataaagccaagactgttcagtttgccagccataaaaataagaattgaaaaccaaacgagtgtgttccaagccccagtttcatgtaataagtcgtcaacggataatacaccggttaataagagcaaagtgacggctatgaaggccactaaggtcgcgtctagcccagtgagactagctgagatccaaagaaagagggccaacataaaaataccgcccatgagtttttcggccaaagtcatggcccccatctgctcaagttcgttggcagcccacgcatgcgcgttgggtgtatccttaatttctggcggatagagccaataaataatagctggaacgctaattaagcaaataagaccaggtaatagagcggcgagtaaccagtccatccatgtgatgtgaatctgcattgcttgggccaaggccacggcaacgagatttggtgccatcgcggtcatgaataagccactggtggcaatattaccatggaaagctgacataatgagaaaactaccaaccttacgctgcgtaccgttttgtgggtcagagccgtatgctttagctaaagattcaataattgggaagacgattccaccggcgcgggcggtattgctaggcgtggccggactagtgacgagatcgacaccaatcagcgcgtaggctaatccaagggtctttttaccaaataatttgacgaagaccagcgcgactcgtcgccctagccccgtttttacgaagcctcgtgataggaagtaagccattgcaatcatccaaaccgtgttatcaccaaagccggccatggcatccgtcatcgaggtaacaccaagtaagacaccaagtgtgagaccaataattgcgacaccggcaataggtaacggctgggtaatgcaaccaatgatagtgccaacaaagagagccagcatgtgccatgctaatagactgagccccgcgggacgaaatggcgcgctcagccaaataatcaaaccaattatcagcggccatgtaagttgctggtagttgacggattgtaatttggtcatcgaaaacgaccacctttctagtcaaacgttaaaatcgtctcacggtgactgctgaaactagtcagcaaatgatgctaatccggacacgatttctaaattagaattaatgcaaccctaatgtcatttttgctgcccgtgacattttatcaagcgaccaggccggttcccagacaaggttgatgagtatctgatcgatacccgcgacggtcattaatgcgtttttgatatggtcattcaaatagcctgtcagtggacagcccatgatggtcagtgtcatggtaacggtgcagagctttaggtcagcatcgtaagcaacatcgtagatcaaaccgaggtcaacaatgttcacaccaagttcaggatcaatcacggtattcagagcggctaaagcttgggtttttaaagtagattgtgtatccatactaatcatgagaaagactcctttagaccaacagcctaagcagggtgatccgcttaggctgttaatggtcggttatttaatgaatttaacttgttcgttgatttttttaatctcagcttctttacgttcgttgaagatgaccttgttcttttcaaacaagttgtcgccattcgtatcgatggagacaattaacggaccgaagtctttgacctcacacgcccagagtgtttcgggcattccgaggtctttccactgggcatcaacaatcttattgacgtgcagggcggcataaacagcattgccagcggggtaaacgaggtgtaaggcgtgatatttcttgcaggcccgttcggttcccggtcccatgccgcctttaccaacgattagtttgacacgggtttgttttacgaattcttcttcaaatttttccatccgcatactagtcgttggcccgactgcgaccatttcgtacttgtcatggccgagatctttaatgatcgggccagcgtggagaattgctcggtctgtcacgttaacgggtaggggacgatgttcttcgacgagccgccgatgggcaacgtcccgacaggttgttagtgagccattcaagtagacgatgtcgccgatacgaatgtccttaatatcgtcatcagaaattggggtggttaagtggtaagttttcatgataattcgactcctttgttcagtggtaagtcatagtttagatctgcgtcaaagttgataagtccgcgccggtgtgaccagcagccggtactaacagcgacgccaattgttgatgggtgtcgggtggtattctcgacattgacacccattactgacttttgaccgccaaacccctgtggtcccaggccaatgtgattgatgccgtcttctaataagtgttcgagtttggcagcattagcgtttggattttcactatcgacgcgccgcattaaagctaatttagaattaagcgcagccgtttcaacggatgtggcgacgccgacaccgacgagtaaaggtgggcaagcgttaatgccgaagctcgtcatgcgatccatcacgaaacggacgacgccttcgtaaccttcaccaggcatcaggactttggcagccccgggtaatgtgcagccaccgccggccatgtacacgtacattgagatgtcagtgccattaccatcaacttgcagaaaaatcgaggggatgccgtcaccaatgttcataccggtattgtattcgtcaaatgtctgaacagcattatgtcggagtggcgctttttttgtcccacgataaacggcgtctttcaaaatttgattgagttcgcctaatagtgggaactgcgcgccgcatttaatgaagaattgtaacgcaccggtatcttggcaacttgggcgtttaagtttattggcaagtaattggttttccatcatcgtgtcgtagacgagcttttggagtggatcgacttcgatcttactgagttcttcgagtttggcagtcacatcatctggtagtcgatgactgatgagcgcaatataatcggccaaaatgtcgcgcatccgttggcccttagttgataatgttggttcggtatagtcgtatgtcattgtatccatgctggtttcctcctatcaatttacagctacattgtaagtaactgtgtgatacaaaactaaccgctactcgccgagttatgccaggtattggattgtgaaagtgatggtaagcggacaggtagccggttaaaaatgacaaaaaaataccaaggccttctgacgagtgatgccgtcgtaccttggtatgacccaatatttgatcaaaatatcggtaagttcagttgttcgtaatcacaaaaattgttatgccattaattattgattaagcaatgtttttaattgcgcgatcttttgtttgagtgcctgatattcttgaaaatgtagtttatacatgcaactttcacaagcactgagttgatcagtacttgtgagttgggcccagtgcttgagttgcttttggacaatggtagtttgtgtgggagtgagcggttgcttgaactggtcatattcaggacgttgcccgtgtgacaaatgttgacggtaactggaaggtgtctgaccaaaatgcttcttaaacattagattgaaggacttgacctcctgaaccccattggctaaggctagatcggcgactcttgtggttgggttttccagatcgtagatggcgtgttgtagtcggcagcgggttagatattcgtaaaaattcaggccgagttccgctttgaagatgcgtgagagataggctggtgaatagtgactgatttttgccgcttcgtttaaggtaattggtcgatcgtaagcctggttaatgtaatcaatgacccggtttagtgaactctgcgtcttgggttggggataagtcatcgtgattccagtatcaaagaaatcgtgatgtagcaggttcgccaattgaaagtacagggcgttcaagtcaaaaattggccagtcctgctgatgtaatcctagatagagttgtgccagaatttggcgaatcgtttggtagtcacggtgttggggcgtcgtcacgctgttgagtagaaaagcacctgaactgaggtcgatgccctgactagtgtagaaatcgggcagaatatgtaaacggagcgcgatacattctggggtcaaggcaaaggtggcatggccgcgattggcattgatcaagatgaggtcatttgcgtgtaattgatgacgcgtcccgtcaacattcacttcgacggtaccttgcaataaccataagagttcgatttgcggatgccagttgtagtggtaactaccaatcatgtatgttaataagtcaaattggacggttggagtggattgaaaatgctgactaggtatcatgacagtgtcctccttaggaataactttgattagctctagcttacacgttcagaagatgcttgaacagcagtcgacaaaagaatacaaagaaaaatgacaaaaattgactagtatcagttatgatggaaatataagtaatggtaactgaatgttggttgtggtcacgcttaatcaagactgaaagtgacccaggcacatcatcgttgttagactaaggatgaaatggtggagaaatagtggatacgaagataattgtcaatcatgcgctacgagcgcttttatacgaagtgacggtcaaccctaagcccgggctggtcgacccgttgtcggcgggtccccatccagacatgaacgcttttatgtttattgatagtgctttgagtctagccccctactttaatgcttgtgcagcggcgggcgtcgcgtatacggctgtcgatttgacgggtttgttcaagcaaattcggggcattggtgttcaagcggaacaaaccatgtttgcggcgaccaagggcgtgaatacccataaaggggcggtgttctcactgggcgtgctagtgacagcggcggcgtatcagttgcagcaccccgacgtcgacttagcaacgattgtgcgcacaatgctggcggggttaacggcaaatgattttaatgatttaaacacgaaggatccaacgaccttaactgctggagaacgtcaatacttaacatatggcatcaagggaattcgtggtgaagccgaggcgggttatccgaccgtgatgcaagtggcactacccgcattgaggcgtagtcgtggcacgattaatcagcggttattagacacactgatggcgattgtccaggcgacggtcgataccaatctggtaaaacgggcacacgacccacacgtcattgactgggtccacgaccaagcacaccgctacttcgatttagggggaagccgcagtgaagctggaatggcgtttttacgcgaattgaatcagatttttgtcgaccataactatagtttaggtggctcggccgatttgttgattttgacgatttttattggatttcagacagatatattagcttaataatgagtgtcgtgattgtaggtgacgacacttttttaataccaaatattaatggaaattaaatgacgattgcaatgcttagttgatgagtggtcagtgctttttagtggtgatggcatcgaaagtcgtttcagtaggttctggattaagcttttagtatgttggttgtaacgccttggttaagcaaaaatagtattagaatgaacgaaaatttaataccgattataaaaaagttaactgtacctaacaattatttgcattagcgttaattatcagttatgcttatgacgatgtagaaaaccgactaccgcgatgaacggaggaaatgtgatgttaaaagtacaaaacctcaccgtggcatacagtgacacaccagtctttactgatgttgccgttaactttaacgccggcaaaattactggaatcattggtcccaacggtgcgggaaaatcaacgatgatcaaagcaatgcttggtctgatcaaatcccaaacgggaaccgtcgaatatgaaggtcgtgcgctaaaacaatttcaaaaacagattgcatatgtcgagcaacgtaaagatctcgacttaacctttccaatcaatgtttttgacgtcgttttgactgggacctatggcaaactcggacttttccgcgaaccaagcaaggcggatcgtcagcgttgccaagatgcacttgagcaacttgagttagctgatttagcacagcgccaaattagtcagctttctggaggacaattacaacgggtctttgtggctcgagccttagtccaagaagccgatatcattattcttgatgaacctttcgtcggcattgatttacagagtgagacggctatcatgacgatcttgcatcagtggcgtgatgccggcaaaatgattattgtcgtgcatcatgatttgaacaaagtttcacgttactttgatgatctcgtgattttaaatcacggtatcgttgattatggtcccgtggacgcggtctacacacccgcaaacattgaacggacgtttagtgctgatctttcggccgtcctgtttacgaaggaggaaacgcgatgatgcaatcaattacgacctttatggctgctttggggaagtatgatttcttacaaagtgcgctaattacggctattatggtcggggtcatgtcaggaattattggtagttttattattttacggggcatgtcgatgatgggcgaagccatctcgcatgccgttttacctggtgttgcggtagcttatatgctcggtatcaacgtcctaattggtgcttcggtttttggaattctagccgctagcttgatcggattcgttgcgagccgtagtaagattaagactgacacctcaattgggattgtcttcagtgcgttttacgcactcggttttatcctaatttcattagctgaaagttcgacgaacttgcaccacatcttattcggtaacatcctcgctgtgagtgatactgatatgatgacgacgacggtcgtgttaggactagtgattttattcgtggtcttcttctacaaggaattactgattacgtcatttgatccgacctttgcgaagacttatggtctcaaggtccaactgttacattacgcgttaatgctggtcttaacgctagtgaccgtttcagcgctacaaaccgtcgggatcattttagtggtcgcgatgttgattacaccggctgcgacggcctttctatggacagaacgactggcagtcatgcttggactgtcagccttaattggggtcttgtcctcagtggtgggcttatatctcagctacacgttgaactgggcttctggtccggccatcgtgctagtagcggctattttcttcggtatttctttcatcatctcacctaagcaggccttgttgccgacgctttggaaagggcaagcagcagcgcgacgggtgacagcatgaaaacgaaattaattgcactgattggagtcatcgcgatggttaccgggatggcagtatttctgaatcaacgccagcaaagtgccaaagcgacgaccactagtgccaaaatccgggtcgtaagtacgaactcgattctagatgatatggtgaaaaatgtgggtgggcagtacgtccaaaattacagtattgtgaagcgcggcactgacccgcatgagtatgaaccacggcccactgatattgcggcaactgccgaagctgacgtgattttttataatggcttaaaccttgaaactggcggtaatggctggtttaaaaagttagtgacggcttccaaaaaggactttgaccacgatgtttttgcggccagtaagggaattaaggtcaaatatttaacgacgaacgttaatgagccggacccccatgcttggttagatctcgccaacgggattcaatatgtcaagaacatcaaccggacgttgcaggccaaggatcctaagcacgccgctgtttatcaaaagaatacggatcgctacgtggcaaaactaacaaaactgcatgagagcgctcaaaccaaattcaagcagatcccgacgagtcaacgattattagtgacatccgaaggcgcctttaagtatttctcggcggcctaccatgtgcccgctgcttatatttgggaagtgaatacggaatcgcaaggcacgccagctcagatgcggacggcgttgaagaaaattgaaggaacccaggttcgaagtttgtttgtcgaatcatccgtatcaccgaaatcgatgaataagctttcacaggagacgggaatccccgttgctagtacgatttttaccgattcgctggcagctaaaggcaagccgggtgatacgtactactcaatgttgaagtggaatcttgataagatttatgctgggctgactcggtcgtagtacttgggcctataattcggttgtgttgatgtcatgtgatataagtttgttctaaaaaggaccgtggaagttaaatcttccacggtcctttctttattttgaactgctagtttagtcttccgattcgaatgacaattccgtcattgatagttccagatcatcaagtacgtcgttttcactcagaaattgttcccaggcagccggtgtttgttcgcgggtatgggggacgattttatcatgaatattggcaatcacatcatcgagcatcttatccgcttgccgggcgatttcagcatcgttatagcggcgtgctggcgcccggtcctcattttttcgattcagaaaatcggttgctttctccataaaaatggtaataacttgggagttgtttgcgagatagtcttttaaagtttcattatccaatgtattagtcctctctagtttgagtcgtacttctaatataccacgctaatcaggttttaactgtttcaagatcggttggcgggtaaaaagttttgtaacttgcgcagatgtttcgaattgacgccaatcaggcaatttaaacgcaggattgtaaccgcttacgaaaatgatttcacaagccgacactttagaaatagttcacaatcaaaataattttaaatgctgctacgcaggcgttttaaacaacaattatatttaaatttttcaaaaaaataatttatttttaaaaaattagcaaaaatgaaagcatttgcgttataatacttgtgagttaagtaactaagtagttggaaccacatgtgcagcacacatttttgatgaaagaaggatattgacatggataagaagcaacgcaaagtcgtaattgttggtgatggctcggtgggttcatcatttgccttttcattggtccaaaattgcgccctagatgaactcgttatcgttgacttggttaaaacgcacgcagagggggacgttaaggatttggaagatgttgccgcctttacgaatgcgaccaacattcataccggtgaatatgcggatgcgcgtgatgctgacatcgttgtcattacggctggtgtgcctcgtaagcctggtgagagtcgtttagatttgattaaccgcaatacgaagattctggaatccatcgtcaaaccagtggttgcgagtggttttaatggttgcttcgttatctcaagtaatcccgtcgatattttgacttcgatgacgcaacgtttatccggttttccacggcatcgggtcattggtaccgggacttccttggatacggcgcggttacgggtcgccttggctcagaagttgaatgttgccaccactgcagttgatgctgcggtacttggagaacatggtgatagttccatcgttaattttgatgaaattatgatcaatgctcagcccttaaagacggtcacaacggtcgatgatcagttcaaagctgaaatcgagcaagctgttcgtggtaaaggtggtcaaatcattagtcagaagggggccacgttctatggggtcgccgttagtttgatgcaaatctgccgagcaattttgaacgatgaaaatgctgagttgattgtctccgccgctttgtctggtcaatatggcattaacgatttgtacttggggtcacccgccattattaatcgcaacgggctccaaaaagtgatcgaagctgagctatcagatgatgagcgtgcccggatgcaacatttcgcagccaagatgctgaccatgatgaatgtggcatcataaaaatgatgagtaagtatgaggaggaattgagatgacactaaataaggtcaagtatcgtgattttattgcaccgttattggtgggcctgatcatttggttaagtagtcctatcaaaccagccagtgtttcgatgaacgcatggcatattctggcaatttttgtggcaaccattattggttgtattacgcggccgttaccaatcgccggggtcgcaatcattgggttgacactaaccgtgttattgggcatcgtgcctatggatacagcggttgccggatttgggagcagtacggtatggatgattgcgatggcgtattttatgtcacgtggtttcatcaatactggtttaggtcgacgtgtcgcgttggtatttgtacggctgtttgggaaacgaacgttgggtttggcatacgcactgattggcgtcgatttagtaacagcacccgcaacgccaagtaatacggcccgtgctggtgggattgtttatccaatcattcagtcgttagctgaaacgtttggctctgatcccaaggatggcacacaaagtaaaatcggttcattcttagtgttcgcagaatttcacggtgatttaatcaccagtacgatgttcatgacggcgatggcgcctaacttagttgctgtcacgttagccaagagtttacacatcacgttatcgtggatgcaatggttcttagccgggattgtcccaggacttatttgtttattggttgtgccatatttaatttataaaatgtatccaccagaaattaaagatacgcccaatgccaagcaatgggcggatgatgagctggcaaagatgggtaagatgagtcttccagaaaaaatcatgggtggcgtcttcttgctagccttagtcttatggatgttatccagctttatcggtctcgaatcttcattagttgcctttatggccgtctccttgctactcgttgctggggttctatcggtagatgacgtgctacacgaaactggtgcttggaataccttggtgtggttctcaattttgatcttcatggctaatgagttgaacaaactcggctttattccatggttgtctggcgcgattggtggtgccttgaaaggcttcagttggggcattgttttagcggcactcgtcttgttctacttctacagtcactacttgtttgctagtgggactgcccacgtttccgcaatgtacggtgccttacttggggtcgcggtttccgcgggagcgccagcaacctttgctgcactgatacttggctttactggttcgatcttcgcttcgacgacgcattatgcgaacggcccggcgagtgttctcttcggttctggatatgttactcagggaaaatggtggcagttaaactttattttaggtctcttctacctagtcgtttggggtggcattggcgccctctggatgaaagtgattggtatttggtagtctgattttaagcataaaaacaggtaccaagctgccggcaacggtcagcgttggtacctgttttcgaagaagcggattatttggatagtggtgtggcttgatcttcttggagaacccgattcgcgacggcttcatcaatgatgatgtcagtgagtaattgtccgcggagggcgccaagtaaggcttcgctcttgaacttacttttgatgatgccgaaacgacgcggcactttgagaatggcgggcattttagcgccaaagagtttgtcgtggtcggcgttcagaatgtgaccattgatgtcgtatggccgaccgtataacaggccgaccaccgcctgcggatcagcgccacccagaatggcttggcgatgttgatgccagacgggaatcgagtcaatggatgctaaggtgccaattccggcaaatagcatgtccattcggtcaaagttactgatggccggtgtaatggctggttcttgagccaatgcttggtgtgcttgatcattaaacaagtagagtggtgccgggatggtgacgtactgtgcgccgaacttagcggcggctttttgaactaacggtgttgagccgttcgctgcgttcgttttcaggttatcacccataaactgggtgaacagtaagtcatcacgagtgctcgtttgaaaattatcgatgacgctaaggacagtgccaccccatgccaccccaatcacgttactttgaataatctggcgctggattgtttcggcggcaaactcgattacgtggcgttcatcgtcactcgtggtatccgcgtctttgataatataaatatgttcaattggaaaacgatgcttaaatttagcctccagctcactatttcgttcgatgggggtgttaatgttaattttgactaggccggttgccatggcttcgtctaagtattttgaaattagataacgactgacttggtatttctttgaaatttcagcgatgttgattttggataagtaataatcatgtgcaattccaatcaacaggcggcgatgattcatatcgtccatatcgatgacctctttatcaacctaagatttaaaattttaaaactcgtttataatattttaagtttattataccagaaaagctgactttttaaaaattataaaaatccaatctaaatttgatgtttttaaaaaatggtcgtacactggggataacaaagtgaacggtattattttgagaagagaaggcagatattgatggtagaacaagatgagattttaaagttgcacgccgcccatacgggggttttggacattcattcagaccttgcagtgaccgataaggctgatttaggtaaagcatatacacctggtgttgcggtgatttccaagctgattgcggcgcatccggaattaaaggcaaaatacacgatgagtggtaaattagtagcgttgatcacggatgggtcagcagtactgggcctcggcaatattggtcccgcgggtggtttgccggtcgtagaaggtaaggcactcctatacaagaacctcgcagggattaatgcgattccgctggcgttaaatcaggtcagcgtgccagcaatggtggcgacaatcaaaaacatgtcgctctcatttgcgggcattcatctggaagatattacggcgcctaagtgttttgaactagaagcggccttgaaagatgagcttgatattccggtttatcatgacgatcaggaaggcaccgcaattgtcgtgttggcgggactgatcaatgccgctcacgtagtcggtaagtccttacggcagatgcgcatcgttgtcaacggcgtcggcgcatccgggttagctacagctcggttattagcagcggtcggtgtcaaacaactgaccttggtcgatgtttacggggtcgttacagcggatgatcagcggtacaaccagtatcaacggaatcttgccaaacagttgggaacacctgcacaactaaaggggcaaccactggcgaaggtcatggccgaccaggacatcttcattggcttgtcagacgccaacgtcttatcagcaggggccgtccacttgatgaatcatgatccaatcgtctttgcactcgctaatccagtgccagaaatcaatccagcagtagctgagaaggctggggccacagtcattgcaacaggttctagccagtatccaaaccaggtcaataatattctggctttcccggggatcttcaagggcttactcacaaatggggtcaagcaagttgataatgcgttgcagatccaagtggctcaggctttggctaagaccgtgtcgaacccaactgcgacgacgattgtgccgagcgtctttgattcacaagtggtaccgaacgtgacggcggccgttgcagcgtacgcgcaagcacagcattaatcataggaggttgtctgatggcagcacaagttgttgaaatgcaattaaataatccgcacgagcatgcccagtggcaacaattcttaacgtcattagggattactaattttagcccgcaagaggttgaacatattgatgtgaccttaggattgatcgaggatggccaacttgttgggaccggatcgttagctggcaacgtgcttaaatatgtgggtgtctgtaataagaatagtcagccgggggcccggtttaatcaaatcgtgagtgcactggtcaatcggctgtttcaagcacagatctttcatatgatggtatttaccaaggccaagtattcagcgagttttcaacacgtaggctttaaagaattagctcattcggatgaagcggccgtattagaaaacggcgcaccggatatgacggattttgtcaaacagttgccgatgattcccaaccaagcacaacagcgtgtcagcgcgattgtcatgaatgcgaacccgtttacgcggggacaccgctatttagtggaacaagccgcggcggtcagtgatttagtttacgtcttcgtcgttgcgacagatgcgagtctattccgtacggccgagcgcgttaagctggttcaacaagggacagccgacttggccaacgttcgggtcgtcagcgggcaggactatctcgtgagtgcagcgacctttccagcctacttcttggattcagcggcgagcgcaattgaggcgcagacgacgttggacgcccggatctttaagcagcaacttgcaccagcactgcacattacgacccggttcgttggtagtgaaccgacgtcgcggacgactgcgatttataaccgagttttgcagcgtgaattaccaccggcagttgctgtacgagtgatatcgcgaacgacggtggctaatcaaccaatttcggcgcggactgttcggcaacggattcaaagcggcaacttaactgagttaaaccaactggtaccggcaacaacggcccagtttataaaaaataacctaacaacattacaagcgcgaattcagaaaggaatgaaaattgatggaaattaagacaacggcagtcgccggaaccttggaatcatctgatattcaaattatgttaatggcgggagacaacggcattcaaatcgaccttgaatcagatgttatcaaacagttcggggcacaaataaagcacgtgatcacgacgacgcttcaacaattgaatatcgataatgtgaaggtgcgcgctgtcgataaaggggcgttggactgcgtcattaaagcgcggactattacggcagcacaacgggcgttagaaaccacgacaccagcatgggaggtattataatggctgaaaatgaagaacgcttacggcggacaatgatgtttgtacctggtaataatccagccatggtgaaggatgccgggatttacggtgcggactcgatcatgtttgacttggaagatgccgtctcaatggctgaaaaggacgcggcccgggtgctggtttacgaagcgttaaaaacgcaggactatggcaaggctgaattggtcgtccggatcaatggcttagacaccaagtattacgctgatgatgtcaaagcgatggtcaaggctggtattgacgttatccgtttaccaaaagtcgaatcggctgccatgattcaaacgttggaaaaggatgtcgcggcagctgaagctgaatttgatattccagtcggtacgactcatttgatggccgcaattgaaagcgctaagggcgtgcttaatgccccggcaatcgcggcagcctcggatcaaatgattgggattgccttgtcagcagaagattatacgacggacatgaagacccaccgttatcctgatggcgcggaactggaatttgcccgtaacatggtgcttcatgctgctcgtgccgctggaatcgccgcgttcgatacggtctttacaaacatggccgatcccgatggcttctaccgtgagacgcggcatattcatcaattaggatttgacggtaaatcattggtcaaccctcgacagattgcaatggtcaattcagtctatgaaccaaccaaggatgaagttattaaggcccaaaaagtcatcgccgcgattgaggaagcccggatcaagggttctggtgttatttccatgaatggccaaatggtagaccggcccgttgttttgcgggctcaacgtgtgatgagcttagccaaagtttccaacttactcgacgaggagggcaattacattgaaaaatagtgtagaccgcgaattaccagcagaattaatgacgaagttaaattaccaaggttttgagtcaactgaaatcggacatcctgaaattcaacgggtggcccccaaagttcacgtttcaacaggggacaacaaagtcgttgattccgttgctgacgtggtaaaagccactgtcaaagatggtatgacgatttcatttcaccaccattttcgtaatggggatttcgtcttcaatcaagtgatgcgggccattattgatgccggtattaaagatttgaccttggcgccatcctccttaacgggcgtgatgaacgatatggtgatcgaagcaattaaggccggaacgattacgaatattactagctcggggatgcggggctctcttggggacttcgtttcacacggtggtttaaagaaccccgtaatcttccgttctcatggtaatcgggcccgggccattgaacatggtgatattaaaattgatgtcgcctttctaggtgtgccgaatgctgaccgactaggaaatgcgaacgggatggctggtaaagcagtctttggttccttaggttacgccctgatggatgcgcaatacgccaaccaagttgtcttattgaccgataatattgtggcttatccaaatacaccggcctcaattaaacagacacaagtcgattacgtcgtgcaagtcgaccaagttggtgaccctgacaagattggttcaggtgcgacgcgcttcaccaaggacccaaaggaattgaagattgcccagaccgttaatgatgtgatcgtgaactcaccatactttaaaaacggcttctcattccaaactggttccggcggtgctgcgttggctgtcactcggtacttgcggcaagcaatgctcgataatcaaatcaaagcatcgtttgcacttggtggtattacgaaaccaaccactgatttgctcgaagaagggttagttgataaagtcatggatgttcaagactttgacaaaggggcggcagcatcgatgcacgccaatcctaatcaacaagaaattgacgcatcatggtacgctgaccctgataataaaggagcgatggttgatcaattggatgttgccattctgagtgcgttggaaattgatacgcacttcaatgtcaacgtcatgtccggttcggatggcgtgattcgtggcgccattggtggacatcaagacgcggctacggccaaactgaccattatctctgcaccacttgtccgtggtcggttagcgacgattgtgccagaagtaacaaccgttgtaacgccgggggactccattgacgttgttgtgacggaatacgggattgcaatcaacccgcggcgtcaagacctagttaaagcactcagtcatgtcccaggtgtgccggtctatacgattgaagaattacaacaattagccgaaaagaaagtcggccaaccccaaccacttgaatttacagatcgcaccgttgccttgattgaatatcgcgatggcacgattattgatacgattaaagcggtgaaggactaaagtatattgatgacaaaaatgaccttgcttggcaaattgctagctaggtcattttttgtatgacgaattgtcaaatcaagcgcaactttgtcccgaagaaaacttcaaatggactcttccagcctaagaccttacgtggtcggtgatttaaatccctgacaaacttgtcgatatcttgatcagtcagttggtctaggtcggttcctttggggaaatactcacggataagtccgttggtattctcattggttccccgttgctgaggcgcatgaggatctggaaaatagactgggatacttagctcttgactaacttcgcggtatcctgcgaattcagttccacgatccggcgtaagcgtccgaactcgtttgggcgtcacggtatgcaagaggtcaatcatcgcttgtgtgacgttcttggcgtttactttgggaacccgctgagataataaataccgagatttgcggtccaccaaggttaccagggccgaacgcccggttttaccgcgaacggtatcactttcccaatgaccaaaccagcttcgattctcacatgaaacaggtcgttcatgaacggaagggacgtcgttaaatcgtccccgacgttccttaatggttcccttgacctttcgggttttaccacggtgacggagcttacgggcaaagccatgagcctcgtgattcttacgtttgatgcctaaattatcacgttcaatcccacgataaatggtgttataactgacatgccattcactgttttcgtggactaaacgaccggaaatttgttccggggaccactgacgttgaacaatacagtgaaaaacaaaatcccgtaacttcaaatcagttagaagcctaggacgtcggctttttagccgccgtccctgatagttctcttgggctttgacggccgagtatgccttacgaccaccattgcgcttgatttcgcgcgatacggtggctttggaacacccaattttctccgcaataacttgataggtatcgtttaaagtgacgcccaacagtatgcattctcggtcttttaaggtaagatggttgtacggactcatagcctaggatctcctttagatgattgttgtggtgacttcattttataggactcaggctatgagttcttttttatttttttcttacttgttgcacttcaattgtaaattcgtcacttcagaagtatctgagatactttcaaactcatttatcagtgcctgatcggcagaaaattggtgcccctgtctgtactcctcaaaattgctaagcgaaattcctaatctctgaattattttgatcattgtggtatatggcaaatctttataaccgtgctcgacctcacctatggaacgtcgtgttgttatattttttgctaattcaagttgagacattcctttgtttttccgtaacatatgaatcatttctcctgtattcatgaattcacacctaattttaatattttgtgcgagttttgcacaaagttcacagtatcattgaactatgaaataaaatgaatataaatacgtattaggagggaatttttaatgaagattagacatatacgacgatattattcttttttagcctatttaccgatgcttggaattatgacgttaagctggattgttggtggataatcttatgaaaagcaaaaacgtgtattgggagctactgaagtataaatactgcaaaatgtttttgcgcttttttcaatagtgctcctttattaaatatgataatgattagttataaatatactctttgaggagaatataaagatgacattaaagaaattttttgctatgctgattttgaccactatgatactttcacttagtgtattttcaagttttgatggtttttcagaaagtataggtgaaatacatgcacaggcagccaagtataagagagttgcacctaagcctaagggaaaatggaaacttaggaaaaaattcaaaaaactgttaaaataacaaaaaagttaaagaagtctgggtctgcagcaatcatgacttacgtagtacaggcgcttgcgtccaaatatggcggacaagcaatttggatgttcgggggtacattttttgggagctattttcctgcaggaaatacttatttaactgcgtgggcgtataagcgcgctaacaagtatgtagtacaatataaaacagttattcatatttatacgaataaatctaggaaacacattcgtaaaaaggcttcacgtattcagtcgtttgtaaagaaatataaggtggttagggtggattaattatggatcaatacccaaattttaagctatttattgataaatatttaccatggctagccgttattggctttgttgtgacagttagtgttaatggcaatgtttggttgtattttatgtcggtgctgattgtatttgttgtgattgcaattattgacttgctgtttaagtattggaaccacgccaaaattttaggtatcatgattgttcttttagtacttggactatggttgaatcgctaagaaaataccaggattagtgtctgacgcggcattttcaatggatttataaagaggcattgtgcttttctgaaatgccatggctagcatcaataaggggcttctgtcaaccagtgtcgatgaagttatatctagaatccaattcatttatgaattggattcttttttgaagtgcgcccggcatgggtgataactaggcggtgtaagtccgctgtgggccgtagtagtcggaaccacgagttgagggcaagggcgttcgccgtgagacggagtctgaaggaagcctaagacaaaataccgaaccgatgtacaagaagtggctacaaggctgattagactggatgaagttgcttcacaaactgaagtcctacactacttgaagtcgaagttagtaaagccaacggttgcatggtatgaaagctatcattcttacccggggaggcctgtcggataagctcccaacaaggacgccgatatgggtttacaggagtaaactagtcagccgaggtcatagtaatctgccgtatggcagatgaaggactgaacaataataattctcaccgatactggaggtgttggtagtgcgaagattgcagaaaacagaacaagctgaccgccaagggatgaatagtctggaagacaaagagtatcttggggcgcatcgtactactaacggtgaaagtacggcgcaggatggcattcaatttgtagaccgggtccttccttgcaagtagtaatctgaacctagcgtttaagcgtgttcggaggaataagggcgtagctggaattgacggcatgaccgttgaccaactggccgaatatatttacaagaaccgggaagaactcctagagagtttacgtaatggaatatatcggccgcaaccagtcagacgggtagagataccaaaactcgatggctcaaccagaaaactgggagtacctacagttgttgatcgtatgatccaataagctgtggtacaggtgctttcgccgatatacgaacaagtattttccgacaatagctatggattccgaccaggtcggagtgcgcatgacgcgattcaaagtgtcaccgaactctacaatcaaggctaccactatgtggtagacctcgatttaaaggcatactttgatacggttaaccacgacttactaatgaacttcatcaaacaacgagtaactgatccatggctactccacctaattcggcgcttcctaacaagcggggtcatgaatggcgagctgtttcgaaagacgacgaagggaacaccacaaggtgggaacctgtcgccgctactggccaatatttatctcaacgagttggacaagctattgacccagcggggccaccgatttgtgcgctatgccgatgactgtaatatttatgccagaagtaagcgagcgggagaacgagtcttacgcaatgtcacaatctttcttgaaattaagttgaaactaacaattaactgtcataaaacgacggttggctcaccactccgactaaagtttctaggatttacgctcggtgtagaccgtaatggggcatatgcacgaccgcacaaggtcgtgaaacagcgaatcaaacaagcccttaagataatgactgggcgaagtcgtggaattagttggttaatgttgatgaagaaaattaaacagaaaatgcgaggatggctacagtactatgggattggcaagatgaagacgtttattcaacaactggaccaatggttgcgaagtaggattagacagttgatatggaaacggtggaagaaaatcaaaacccgatatcgtgagctaattaagctaggaatgacaccggaacaggccaagactaatgccaatacccgcaagggatattggcgaattgcccataataaaacactaacctatacgtatacaaatcaaaagctggagcgtcttggactaataaacctgtccaagacactccagcaaatacagagtgcttaaattattgaaccgccgtatacggaaccgtacgtacggtggtgtgagaggtcggtaattgaaataatcaattacctcctactcgattgcaaccgaatttgataaaaaagttttactagttaaccatacgtcgttcttttgatttgcctgatttcatctcttttcaactatgactcgatattttgtggtttggtatatttaggtctacaaataagaaaaagtgacaattatgagtaaaattaagcaagaggaataaataagaacatgtgaaaaaataaacatttttatctagaactcattctaagcaatctttgtatgctaatatactgatacataaaccttataactaatacttatagctaaaactgagtttgactatagctatatgggggcgctaaactaggattataaactaaatgttatttttttcacacacttagtaagcgcttaccaacacattaattggaggttatcaacatgacagaatatcgagttgaatcagatactttaggcgaagttaaaattcctgcgaacgccttatggggtgctcagacagaacggagtcgccataactttccgactggtacgaagatgccgttggaaatgattcgggcattacttcaaattaagcgggccgcagcgattgcgaataaagaagttgaagcaatgactgctgaaaaagctgatttaatcgtggctgccattgataagttattagcgctcgacgatgaagatttgcgtaaggactttccgctggttgtttaccaaactggttcggggacgcaaacgaatatgaacgttaatgaagtggtcgcacacatggctggtaagatcaatcctgatattgaaatcttgccgaacgacgatgttaaccatggtcaaagctctaacgatatcttcccaacggcgatgaacattacggccgcagttgccgtggataagctgattgccgcagcggaacacttattagcggaattgaagatcaaacaaaagaagtactggcgggtagtaaagatcggccggacccatcttcaagatgcaacgccattaacttttggccaagaagtgagtggttgggccagtgcgattgaacatgatattgcctacttaaaacagttgaatccaacgttaggcgagcttgcaatgggtgggaccgccgttgggactggtctaaatgctgcccctcattttgctgaaaatattgctgcggcgatgagcaaattgtatgggattgaatttacggctgattccaataagttctatggtttggcccatcattctggcttaaacgtggttcacggggccatcaagaccctagcagccgatttgatgaagattgccaatgatgtgcggttcttggcaagcggtccacgggccggttatgacgaattaaacattccggctaacgaacccggctcatcaatcatgcctgggaaagttaacccaacccaagctgaagccatcactatggcagcggtacgagttatggggaatgacgtggtcgtcgatttagcttctagccaaggtaattttgaaatgaacgtttacaagaccgttttgattgatgccttccttgaatctgctgaattgttagctggaacgattaccggcttcactgaccgaatgattgctggtttgacggtcaaccaagaccggatggcagagttagtcgacagttccttgatgacggttacggcattgtcaccacatattggctatcatgatagtgcgatgattgctcaagcagctgaaaaagcggggacgacattgcgtgaagcagccatcaagtctggcaaagtaaccgcggaacaattcgatgaatggatggttccactggatatgacgaatattgatgattaagctaaaataagtattgatcggcgttgaaccgttaacgtggatcaaggtggcacgggtcattgttcctagacttggaatggtggcccgtgtccagttaacgacaataataaatgagattttggttccatcctggggaataccccggacgaattgagaggagaagtggcaatcaatggctgaaaagtttacatttacaccaaccgccttagcggatctaaaaccgaactatgacgtagtgattattggatcggggggcgcgggtttgactgcggcaatccaggcacatgaattgggcctgaacccggttattttagaaaaaatgccgaaaatcggtggtaacaccacccgggcttcatccggtatgaatgcggcggagacgaacgtccaattgcatcaccatattgttgatagttttggcgatttctacggcgaaacccttaaaggtggtggcggtatgaataaccaagcactgttgaaattcttcacggaacacagtgcgctcgcaattgactggttagcagaccacggcattaagttggatgatttgacgattactggtgggatgagtgtgatgcggactcatcggccaagttccatggctcccattggtggtttcttagtcactgagttgttgaaacaagtggcggctgaccagttaccactcttcacagatgtcaaagtcgatgaactactcgtcgaagccggcaaaattagtggcgtcaaggcaacaaccccagatggagctgtcacgattacggctggagccgtcttgttagcaaccggtggcttcggtgcgaataagaccttgttaggccagtatcgtgatgatcttaaaaactatcagacgaccaatcagccgggcgcgactggagatgggattctgttggcacaagctattggggctaagttggttgatatggaccaagtccaagttcatccgacggtccaacaagatacagatcatgcttatttaatcggtgaagcggttcggggcgaaggtgcgattttggtcgataaccagggggctcgtttcgtcaatgaactcgacacgcgtaagaacgtgacggccgctatcgaccaactgggtggtactggtgcctacttgatctttgaccgcggtattcgtgaccgggtcaaagcggttgaattctatgatcacattggcctggtaaagactgggactgacttggaagcactggcgactgcgaccggcttagacgctgcgacgcttaaacagacggtggctgactggaatcaggcagtcgctaaccataatgatgcggcctttaaccggacgactgggatggatcgcgatattgcggcgggaccgttctactcaattcacattgcgccagctgttcactacacgatgggtgggattgccattaatccagcaacccaagtgttgaatcaggacgaacgaccaattgccggcctgtttgcagccggtgaagtggtcggcggtctccacggcaataaccggattggtggtaactcaatcgctgaaacggtaatctttggccgtcaagccggacaacagatgttcaaatatttacaataagttattttgactaacccaaatcaatagtccatgcgcttgagtaatcggtgcgtgggctatttttgatttgggctgtagttagagaccaaagaaattagtttaaaaatcgactaatttcggttaagctggaaatataacaaacatataggaagaaagtgacaagcatggcgacgatttttacaaccggtgaaccgcaaacaatcacggcaatgctagcagcccgtgatcaacgggtcgcgtatcagcaacagttgacagcgactaacccccgggccacgattgcggcaattaagttgaatattccgggaccgattaagaataacgctgcactacgacggttgtttttggccggtgtccagcggtttgaagctgagttgtcgacatacacggtggcagctgattggaatcatccggcgggtaatgagcggttcttgattctgacgactgactttgcgactagcaaacggctggcggtcgcttttgaagaacacgatccgttaggtcgcttatatgatattgatatcttacaagcgggttcacagcgcgcgctgtcgcggacggatttggggctgccgaagcgtcgttgcttattatgtcaccgtgaagccaaggattgcgcgcgttcacggcggcattcagtggctgagctacagcaaaagattgcggcgatgtatatgaaggaatttggtgagcgcggatgaatacacgtgatttagattattttcgggcgttagttgattgccaaaattatacgatggtcgccaagcagtttgcggtttcacaaccggcagtgactcaagcaattcatcgattggaaaaagagtttgcagtcaaattggtgattcaagaccgtcgccatcaacagacaaatattacccgggccggtcagctgctttacaagaatgcacgccagatccaggcgagtttgcaacttgctcatcgcgaaattcagagtacgttacagactgatattcgttttggcttaccaccaattattggcactttatatttccctcaaattgcggaaaagttacttcagaacgggttactgcaacagttaaaaataacggaaacgggctcagatgagctattgcgtaagttagtgcatggtgagatcaacatcgcgttattagggtcctacttaccatttgatttgccgacagttagtgcggttcacttaggggcacggccattcagtattatcgtgagtcctcaaaatagtttggcgaaacaagccgccgttagttttaaggatctcggtcaggcacagttcattggattagatggcaaatacgtgcacccacaagccttccgagcctattgtgactttgccggggtacatccagaagttatctaccggacccccgatatctcatgggtcaaagccttagttaaagccaacttgggcattagcttactggttcgtgatgtggttaaagcggatgatggcgtcgtatgtttggaaatcaaagatcaattgccggtcagcttcaatatctcggtggtcacacgggctgggtacttaccaaccactgatgaacaacggtttattgatcaattacttaaaatgaagatttaaacgtcgcgactgagccatctgtctaagtgaacagcacgattccttgagtggttcaacttttactttgagattgacgtgtcttcacgattgtttcatttggatatatcgcaatttgtcttgattacgaaaactgcaccaccctcacagactattctgtaagggtggtgcagttttgcttaatcggtctgatcagtgtcaaccgctaatgtttcgtgcaaaatggtcagtagctgttgctgcacgggggtcagaatatgggttgttcggtagacgatgcttgtgatgaattcagggggttcaatgtccatcaagtccagtcgtacgacgtcagtacggtagtgatcgacgattttggtaaagaaaccgatgccgacattttcaccaatcaatttcattaaaacgtgggtatcgttggaacgaaagacgatgttggggcgaaagtgattccggcgcgtgagtttgttgaaggccgtattatggatgaaattactattaaagaaaacaaatttttcacgtcgtagttcgttaaagtagacccgtttacgttgtgctaacggatgttgtttggacacgtagatacagaagggctgacggtcaaattcttcggcaatcaacgtttggtaagcgagcggctccaccgaaccaagtagggtcatgtcaacgcgaccgtcccgcacagcgttacgtagccaaatcgagcccccctcaatggtttcgagaccggctaatagcccttccgcggccaatcgggcaccgatttttggaaaataatggttttcaataattggcggtaatcctaaaatcagtcgattttgggatagattgtcgatttcttggtgggcgaggcgtaactcatgtaaaacgattttagcgtgttcagcaagttgcgccccgctagcagtgacgtgtaacgtatttttaacacggtcacgaatcacgagtggtgccccgaattcagactccaggcgtttgattgcggtggtcacagttggttggctcacaccgaatgttttcgcaacttttgaaaaatttttttgagaaattaattcatcgaaataagctaagtcttttgtgttcatttttattcctttctaaatcagcttttgtagcgaccttatttaatatatttatatcatatcatagttttgactataacattttactggcgttacagtattacttgtaaattgataggacgtttttcctagcaatgaaaattgatgaaaatgtaaattaattaggaggccgcagtaatgacaaaaactgcaagtgaaattttaaataacccattcttaaataaaggcactgcctttaccaaagaggaacgtcaagcacttggtttgacggggacgttaccaagcaaggttcaaacaattgatgaacaggcgacgcaagcttatgcccaattcaagagcaagcccagtcgtttggaacaacggattttcttaatgaatctctttaacgaaaaccggacactattcttccatttgatggatgaacacgtggttgaatttatgccaatcgtttatgatcccgtcgttgccgattccattgaacaatataatgaattgttcttggacccacaaaatgcggcctttgtttccgtagatgcacctgaagatattgaagcaactttgaagaatgcagcggacggccgtgatattcggttagtcgttgttacggatgctgaaggtattcttggtatgggtgactggggtgttaacggtgttgatattgccattggtaaattaatggtttacaccgccgctgccggcattgacccatcacaagtactgccagttagcatcgatgctggaacaaacaaccagaaattattagatgatccattgtatcttggtaaccggcacaagcgtgtttccggcgaacaatactatgatgtgatcgacaagttcgttgctgctgaacaacaattattcccagattcattgttacactttgaagatttcggtcgcgacaatgctcaagtaatcttggacaagtacaaggatcaaatcgcaacctttaacgatgatatccaaggaaccgggatggttgttttagctggtatcttaggcgcattgaacatttcaaaggaaagcatcaaggaccaaaaaatcttatcatttggtgccggaacggccggtatgggaattgccaaccaaatcttggatgaattgatgcaagctggtttaacagaagaagaagctaaacaacacttctacgctgttgataagcaaggtttactatttgacgacacggaaagtttaaccccagcccaaaaagccttcacgcgcaaacggagtgaatttagcaacgccgacgaattaaccaacttggaagccgttgttaaagccgttcacccaaccgttatgattgggacatcgactcagcctggtacctttactgaaagcatcattaaggaaatggcggcgcacacggaacggccaatcatcttcccactttctaacccaaccaagttagcggaagctaaagcggaagacttaatcaaatggactgacggccgggccttagttgcgactgggattccagctgatgatgttgaatacaaaggtgtcacttaccaaatcggtcaaggaaacaacgccttgatgtaccctggtttaggatttggtttgattgcttcaacagccaaggtgctgaacgctgaaaccttgtcagcagcctgccacgcattaggtggaatcgttgatacgtcgaagccgggtgccgcagtattgccaccagttgcgaaaattactgaattttcacaaaaattagctgaagtcgtggcacaaagtgttatcgatcagaagctcaacaaagaaccaattgcagatgctaaacaagcggttgctgatatgaagtgggtcccagaataccgggccatcagcaaatagtgtcggtaaaataagagaattgtaagagggtataagagcacatgggagttttatggaattcaattcaaagcgtcttagttgtcgttttgatcatgatattaggtttcgtcctacgacgagcaggttggtttgatgataagtttgctggaacaatttccaaatttatcaaaaatatcgctttgccagcatcgattttcgtatctgtgctgagccgactaactcgtgggcaattaggatcatttgcaggttacttggcatatgcatttctagccgtgattattggctacttgattgcctttgcgctagttaaaattatgcgggtccgtccaggtcgtaaggggattttcatcaatgcgatcgtcaacgccaacacgattttcattgggttacctttgaacattgcgttgttcggtgacaagagtatgacgtatttccttgtttactatattgttaataccgtttcgacatgggcatttggggtcttcttgatttcaaacgacgacccgacgaaatccaaggaaaagacgcataacaagattgattggaagaaagtcattccaatgccattggttggtttcttagttgcattaattttcttactgctaaatattccaatcatgaaggtatcatttgtcagttcaacgttgacttacgttggaaacttagtaacaccactttccttgatttatatcgggatcgtgttagccgacgctggtctgaagagtattcgctttgaccgtgatacgattgttgcgttgattggtcgcttcatcttgtcaccaatcatcatgattcttgtcttgatggttgctggtaatctcggtgcaagtttcccaaccttagcatcgcaaaccttgattgttcaatcagcaacgccaatgctagccgtgttaccaatcttggctaacgaagcacatggtgacgtggaatacgccactaacatcgtgacaacgagtaccgtgttgttcatcgtggttgtgccagtcttgatgaccttgatccaatatatttaaagtttatttagaagtattccggttgaaagagacgggatgcttctttttttgatcaaaactgcttgagttgaacccgattaaaatatgttaaaggttaaaattaaggtcgatcagtcgaattatttcagctgaccgaccttaatcttttacgaaaggagtgcttgaagacacaagcttgtggcgattgcgtttaaacagatgaatatgatagaaacaaatttaagtcgtaacccataataatgcggttaaagtaaaattagtgaatcttatggattattaataaatttgtttaaaataaccaatgctgtaaagtgctgccttgaaaggattcaattaggaattgattgaaattgttagatttacttgactaattgcacaaaaattaatagaattaacaacgttgcattattaagatttagattaggaggcgtaccggatgaaagcatcacaacgattgctggttaaaaaatcagtcaatccagctaattttaataagggtggcctcgaaaagacgttgagcgcatttagtttaaccatgatgggtgttggcgcaatcgtgggttctgggatttttatcaccccgggaattatcgccgctaagtatgccggtccggctgccatgctctcatttgtgattgctgcggtcgtgtgttcgctggccgcattatgttacgctgaattttcttcaaccattcccttggcggggagtgcttatacttacgtttataccgtttttggggaattcttagcgtggattcttggttggtctctgatctcagaatatttattcgcggtatcttcggtggcggtaagttggtcatcgtactttcagaatttaatgagcggctttggcctaaaactaccaacatttctgaccgccgcagctggtactgccggtgtcagtggtgctggattcaacttaattgcttttgtcgtggttttggctgtctcactgttattggtcggtgggttacaagagtcaacacgggtcaattcaattatggtaatcgttaagattctagtgattgttcttttcattggcgtggcaattttctttgtgaaacctgccaattatcatccgttcatgccccatggtgttagcggactggtcaaaggcgcgtcgttagcattctacgcgtatattgggtttgatgcggtgtcgactgcttcagaagaagtgaaaaatcctaagcgtaatatgccaatcggaattgtcggttcgttagtcgtagcatcgattttatacgtggcaatggccgccgttctggtcggggtcgtgcattacagtaagcttaacgtgggtgatcccgtggcgtatgccttagccgtcattcatcaaaactgggcggcggggattgtgtcactgggtgccgttgtcggtatgacgaccgttttgattgtcatgttatatggtgggacccggttactgtttgcgattagccgagatgggttgttaccaaaagtctttcggacggtcagtccccacaccaaagtgccggttaagagtacttggatttttggcattattgccagtgtatttgcggctgtgattccattagataaaattgcggagttagtcaatattggaacgctatttgcattcgctatggtgtccatcggtgttgtcttcctgcgtcgacacgaaacgctacaacaaatcaatagttcatttaaagtaccattttatccagtgttaccagttgtctcgttcctcgcatgtgtctacctgatgcttaatttgcaggcatttacgtggcatatgtttggtatttggctggttattggcatcgtgatttactttgcctatagttatcggcactcccgtattcgagcagggttacgtgccaaagaatcaaaatcgtaattaatagtgggtgcttaccggggcgggtaagcacccattcttttcgcggctactaagctttgagatatgctataattaagcgcataattcataaggtaaagagagttgaggtggctgatgatgcagagacgttcaaacgcctatcatatcagtgtattagcggtactaatggcaatcgtgatcattcagaatattgttccgttttttgggtacattccattaccaggattgagtattacgacaattcacgtgacggttatcctggccgccgtggtcttgggaccgcgtgatggggcaattattgggggcgcatggggaattattgcgtggatacgggcgttcgtcgcaccgacgagtcccttagcaccaatcgtatttaccaatccattgatttcggtgataccccggattctcgtcggtttgatagccggttgggtctttatttggtttcagaagcggcatcaaaaagtgttggggatgacgctggcgggcgtggccggggcattaacgaacacgattctagtcttaggtttgattgggctactctatagtcatcaagcagccggcttttatcaagttaatttgagcaaactaatgccgtacttgttaacgatcgtggcctcgaatgggattccggaagcgattttagctggaattctcacaccactgatcgggacaccattactacgttttaaaaaataagtcgctaaagtgacagctagcttgaatcaattcaaatttaaaacagccacccttgaaatctcctgaatttcaagggtggctgttttaaatcgctatttaacggcttgaacttgtttctgactaataattactttgttgtgatacttatcaacgatggctggatcaggacttgtaaaggtgattaaatacgaattagtgtaacttttcgcaatggtcccggtataagtctggccttccaaaatgaacgtcacttgtgttccaatatccatgatgatgcctcttttcgcacgatagttttattaaggataacacaccagtggacgtaacaggtaaaagttcactaattaaaacgtcgccgaacttgggcccaaattcccgttgctagggctaagagactggtacccagcgttgcgagccatgactgagttgtttcgtcggtctgcgggagctcagttgtggctttggatgctggtgaggagacggcaactaagtcggcactgtcagtattagttgttgtggcagataccgtggctggcgtcgtcacacttgcttcctggtcactataatcttgaagcagactagccgtgacggccgaaccgctgtcatcgtgattaactaaccagtcagtgttagtcgtggcggttgaaccgaccataattgaatcactgacttggcccttaatcacgttgctctgatcgatagtgcttgtctggttcacagtggtcgtcgcacgtgttgcgtcaaccgccgtgtcggaatcactatccactgcgttatccgtgtcgttcaagtcaacgtaactagtcgttgaatcatcattaggtttcgcatgattggtcgtgtccggtgttgtatcactagttatgtcggtagtgtcagtggtcgtgttatccacgatagtttgatggtcactgatggcctcatcagccgtcgtttcatcggtaacattgtcctgtgctgtggaatcggtcgttgtaccgttgtcagccgctccctgattacgattatccgttacttgatcaacatcaactgcttcatcttcagcatccgctacggatagcaatggtgttaagaaagctaacaagtgttggcggtattgtaggatcgcgttattagccgcagcgtgaccaccgacagtccctggtaagatccaaacttcttggttggcagaatgattggcggccgctaattccaatgattgagtatatggaatgaaggcgtcgtcttgcgtgtggatcaagagtaacgggatagtgattttgctagctgcatcggttgctgataagtcatcgacactgaaaccttgttccttgatcaaacgagcgttcatcgcggccacgattttatcataggataagaagggcaggctcgtgatggctggcagaccaacggattgaagtgcgtttgaaacggcggtgatggctttgttgtatagcgaactacctagttctggtaaggttgcgtacccggcgtccgacacaactgctttaacggattttgaaagtccaggaactgaggctgcttctaacacggtgtcggcacctaatgattgaccataaaagacgacttgactgtcggcgccattgcgttcgtcgaccatcttaacccaattcagccagtcatacttgtcctgataaccaaacgttaagttatcaccgtcacttaggaactggccacgttgactcggcatgaggacgttataacccatgtcataccaagtctttgaaacgtagccgatccaatcaacatgttccgtccaaccttggccgatgatgacggtcttggtggaatcaccgttttgaatatagtaagcacggacagactgcgtcgggtcattgtattcaggcagggtccaggtttctttggtaacgttatcccaccaagtaactgttgtcggataatattcttcggccgcagcccggtcagcagcataagcgactggatcgaggccggtccacgtattggagatgtcatagcggtgctggttcatttcagtacgtagattagagagggcttctgagccagttcccgtgaagacgattgggtagagtacattacccacgatcgtgctggcgatatctgtggggagttctttcaactcgtcaagaattgtcgtcagtttggctttggctgctgctaattgttcttggccagacggggtcgctgcttgatttgctaagtccttgatcgtattaacgacggccacaatatcactggcatctaacgtgaccgtggtggtgtccgtcttatcagaggtagtaacttttttccaggtcacactgtaagggccactttgtgtaatggtgaccgtactcttttgattgccagtcgtgtcgttggtttcgtagattaagccatgaccgctgtcacttgtcgcggcactagccgcgctggtcgtcgccacactagttggcgttgccgcagcggtcgaatcggtgttggtactcgtatcatcagttgaatcaatagctgaatcaatagctgaatcggtcgttgacttagtcgtggctgtcgccatatccgtgacttgagtagcgtcactcgtcgctgagctagcggcctgttcgttaccacttatggtattgtctgccgtcgaattagtagcgctggtcgtctgactagttactgtgccactcgcactgttagcaacctcactagcttggtcggtagctgacgctgcacttgtggcttgttcagtcgcgctagtctcagtagcgttagtactagtcgtaatttgattggtgtcagtggtagcgctgctgtcggtatttgacgtggtattactgtcttcaccagtagtcatgctacttgtcgtggttgacacggttgccgttgccccggcggcttggctgagttgactggcaacgctagctggggcgttggccgcagaagtggtcgtggcactaacgggggtagccgttgctgctaaggcgttagtcgtcagcattaacgtactaccgagccccgcaatggtaatccccgcgtaaacccaatgtttgccatctttgaacattttataatgatcaacggtggttgattgttgtgaattccttttcattatatttactcctcgtaacgttttattctattgcacgttttaaaatatagcacgacaacccaggcttgtttgcgttttcgcgggctaaacttgttaaatgaggtacttttttaataacggcatcagttgtttattgtatgaactaatttgttaactgattgagtacgatgattgatttttatgatgcgacaagctcagttattcgcgggagtcacgcgtgattttaccagcagatgccagattgcaaaatgtgaacttacaaacgaataagcgtactaatagtggccttgaaaattagcggctttgactattttgggaataaaagttgagattgattgaaatttcacttatcacttgctattatgaaaggtgaataaagtgtttccgctttcgtagggaataaattaataaaggggggaccattatgaatctcggattaagtattttatccttggcgcgttttcagttcgcgatgaccacggtgtttcatttcttctttgtgccattatcaatcggcttagccttggttgttgccatcatggaaacggtgtatgttgtcaaaaaagacatcatgtacaagcacatggcacaattttggggccgcattttcttacttagctttgccgttggtgtcgtgacagggattatacaagaattccaatttgggatgaactggtctgattattcacggtttatgggtgacatttttggggcgccactagcgattgaagcgttagttgccttctttatggaatccacgtttattgggttatggatgtttggttgggatcggtttaatgccaagctccactgtgcgtttatctggctaacgtcgattgggacgatgatttccgcgatgtggattttagcagcgaacagtttcatgcaaaatccagttggtttcatgatcaataccaagactggtcgtgcacagatgacgagctttgcagcagtcgtcaagaacgaacagctctggtatgaattaccacatgtgttgtttggggcgtttgttaccggctcatttgtggttgctgggatggcggcgtttgcgttactcaaaaagaaaaacgtcacgttcttccgcaaatcgatcaaggtcagtttaatcgttggcctggttgcttccatcggtgtgattggaatgggagatttacagacgcgttacatcattaaagaacaaccgatgaagtttgccgcaacggaaggcttatataaggattccggctcgccagcttcatgggcagttattgaagggatggatactaagaaccataaggccaactggtcgattgaaatcccgtatgtgttggatattttaagctatcataagttgtccggtaatgtgaagggacaaaatacccttaacaaggaacttcatgccaagtatgacaagaaatttggtaaggacatgaactactacgtgccaacaaagacgcttttctggagcttccgggtcatgacggtagctggtgggctcttcgcactgattgccattatcggtctatacttcaaccgtgcaaagtcaacgctgattgagcggcagcgctggttcctgtgggtactaggaatctgtacgttcttaccattcgccgcaaacacggccgggtggctgattactgaattaggtcgttatccatgggttgtttatggtttactgacgattgcagatgccgtttcaccaaatgttagtgtcgcttcgttgctgatctctaacatcgtgtacttctgcttgttcagtggcttaggcattgtcatgatcgtcttatcacggcgtgccttacaccaaggacctgatgatttgttacaagctagcgatgacgcaccgtacgatccttatggtaaggaggcgttcagtcatgagtaatctacaattcttatggtttattctggtgggcgttctatttagtggtttcttcttccttgaaggttttgacttcggggttgggatgacgattaagagcttagcccaaacacgcgctgagcgcgatgttgtgattcatacgattggcccacattgggatgccaatgaagtgtggttgatcactgctggtggggcgatgtttgcgtcgttcccaatgtggtatgcttccttattctccggattctatcttatcttattgttgattctagtggccctcattatgcgaggggtctcatttgaatttagaagccggatggaaagtgacgccggccggaatttctgggaatgggccgcagccctaggtagtttctttgctgccttcctatttgggatgatgtttactgctttggtcaaagggatgccaatcaatgccaatggcgatatgactgcccacttcaccgattacgtgaacttgttctcaatcgttggtggggttgccgtaacgttactctgctatttgcacgggttaaactttattcgtctgaagacgaccgggacgttgcgtgaacgggcgctccagtgggccaaaccgttatactgggtcctgtttgccggtgaagttgtcttcgcaattctgctgttctttaacaccgatttctttaccaagaaaccaatctcaaccacgattttagtggtcgccttagtggctttgacggtcttggcaacttggggtgtttatggaaatcatgaatggctctcatttattagcagtggtctctcactgatcgacgtggtcgtgctcctgttcaatggactattcccacgtgtcatggtggcgaacaattctgcatacagcattctgattaaagatgcgtctaattcaccatatacgttgcatctgatgactgtaatctcattatcggtattaccgattatgttgatctactttatttggagttactgggtcttctataaacggttggcatcgtaattcaaatgcagatgacgacagtatcactggtgcggtggtacaattaatttaacagcaccaacggggtcgcgaccttggccaagtgccagggtgcgaccccgttcattttaagtagggagtgatcgaatgtgtttgatccggcattatttaaactaccagggatgcgccgagcagccacgattttagggttactggccatcgtcgagggtatttgtattgtctttcaggcctactatctatcagtggcgattgttggactgtggcacttgcattcattggcgtcgatcagtcagcccatgctatggttcgcattagcttgggtcggacggcagttactggtcgtcattaaaaatcgtgtgatgtacccgttagtcgaacagacgacgggtgacttgcggcgtaaagtgatgcagaagttataccaactcggcccaagttatgtagctaagactgggactggtaacgtggtgacgacagcgcttgaaggtatcgataaagttcagacatacttaatgttggttgtgattaaagtaatcgacatgatggttatcccgtggatcattttaatttacatcgcgtggttgcgttggcgtgaggccctttttctactggcaatttttccattaattattctatttatgattattttgggctatgccgctcaagctaaagcggataagcagtacgtgggctatcaacggatgtctaatcacttcgttgatacgctgcgcggtttaccgaccttgaagcagttaggactgagcaaacggtacgctgacaacgtttatcaggttagtgaaggttatcgtaaacaaacgatggcggtcatcaagattgcgatgttatcgactttcgccttggatttcttcacgaccttatcgattgcggttgtcgcggtcttccttggttttggtttgattaacggcacgattacgttgctaccagcgttggttattttggtcttatcgccagactatttcttgccattacgaacatttgctaatgattatcatgccactttaaatggcaagaatgcgtttgcggatgtccagaagatgctagctttgccggtgccaactgaacgtcaacagctcggtactcagcctgtgcaatggcaaagtgatagtacgttaagtttacatgacgttgattttaagtatgatgatgatcagctggccttaaaacacattaatattgatgtgcatggttaccaacggatcgggattattggggcatccggatccggcaaatcaactttgatcaatttgttaggtggctttctaaccccggtcgctgatcagggtaaaattcaagtcaacgggaaaacagtctcgcatttgagccaggacgcctggcagcagagctttttctacattccgcaaaacccatatctgttccatgcaacgttagcagagaacatcgctttttatcagccagacgcttcacgtcaagcgattgaacgagctgctgaaaacgccggattaacggcctggattgcaacgttaccagcggggttggatacggcgattggtgaaggctcccgtggtgtcagtggtggtcaggcgcaacggattgctttggcgcgggcctttcttgacgactcgcggcgagttctgttatttgatgaaccaactgcccacttggatattgaaactgaagcggaactgaaaacgacgattttacccgtacttgataatcacttagttttctttgcgactcaccggttacactggattaatcagatggattacgtgttagtgatggatcatggggaaatcgttgaacaagggacaccgacggaattggccgcgcatgacggggcgtacgttcggttacgtgatgaaatggtaggtgcgatctaatgaaagattttttggcaacttttaaaaatgatacttgggtcatgccgtatttgcgcaagtataaaaagttactagccctgacgctgtttttgggtctaatgacatttttctgcggttcagcgctgatgttcaactcgggctacttgatcagtaaagccgcacgacacccgtataatattctgatgatttatgtgccaatcgttctaacgagagcgtttgggattggtcggcctgcctttcgctatgcggagcgaattacgagtcataactgggtgctacggatcgtgtcagattttcgtaagaaactgtaccaatccgtcgccaagcacgccgtagcgattcgccaaaatttccagactggtgatgtcctgagcattttagctgacgatattgaccatattgaaaatttatatttacggaccgtttttccaacggtgattgcctggttgatgacgctagtgattgtgattggtctgggctactttagctggtggttcgggctattgatgttgttgatgttaggattggtcgttgtgataatgccgctatggtcggtcttactgaatggtgctcgtgaatcacgcagtcgtcagattcaacagggcttttatacgcagctgactgattcggtaatggggctcggtgattggttgattgccggacgtcaaacggatttctatgagcggcaaacccagcctatcgaagcaattgcggcacttcgtaaacaggaccatcgctttcagtggtggcgagattttacgattcagatcattttcggggtgatttgtttggcgctcttgatctggagtagtttttactggacaacgaatgcggctagttccaattggattgcggcgtttgtcctctccgtattcccgttggtcgatgccatgcagtctgttagtcagggtgttagtgagtggccaagttatcaacggtcaatcaaacgagtcaacgccttagacaccacgcctgaagatgaacacgatcagacagtcttaacggagccatttcaagtattgcgtattgcggaccttgactttaaatatgcggaaggtggtcacgcgatttttgacggtttgaatctgactttaaaagccggtgaaaagttagccctgctaggaccttccggaacgggaaagagtaccttgctcaagctgattttaggtgacctgacaccggatagtgggacggttcaattgaatgatgtgcccatcacacggttacaaaatgagcgcgcccagttattcggcgtcttggatcagcagccgtacttgttcaataccacgattatgaacaatgtgcggatgggtaacttgcaagcgactgacgaacaagttaaagccgcactagcagcagtcgagttagcgcccttgatcgacacgctccccgatgattacgagacagttgtagaagagggcggtgcgcgcttttctggtggcgaacgacaacggctcgcgctagcccgcatcttattacaagatgcgcccatcatcattttagatgaaccgacagttagtcttgatccgattaccgaggcccatttgctgaccacggtgttccgggtcttgcatgataagacgattctgtgggtcacgcaccatttggccggggtcaaccatgtcgaccaagttcgcttcttggaagatggtcaattcgatatggccggtacgccgagcgaattgtatgcgaacgcaccgcggtttaaacgcctttatgatttggatcaagggcgtgatgatgcgaacaatgatcggtaatccggttgatagcagtcttcacgtgcaccttgggcttgtgaaacagacttttaattactgcgctgaatgggtattcagcctacgaatgtagtggtcatgatgaccattactgattacaccgccgatttagagcgtaaaaaggacttggtcgctgtgaccaagtcctttttatatgcaattaatcgccaggttatgatttaacctgttagtaattttgtaattgtgcccgattctgaacgtcgaccacgtaggctttcgtgcctaagcggctgagtaaggtccgtacatcattgtaattgattgagacgcaaccagccgttgcccattgattcttgacgtgaataaagaagcccgagccattatgctgaccgtgattgtccatcacaatcgctaattgatactgattgtggggcgcggccttcgtgtaatcgatcagatgctcgttcttattattggcccagtttcggttctgccaagtgttatattgccggtcatgtggatcttcaatccagtaagatttccggttgatctgtcgataggccataccactagttcttgcactggcagctttaccaaatgcgaagcttaagtgataaacgcctttgggtgtggtactgctgccttcgtgagaattgccgatgccagcggccccgatgcgacttgcggaagttagtgtattcttccagccgcgattggttttttgccaaagtttaagagtggccgtggatgagccattttgaatgaccgtcacgatttgctgagcctttttggacacgcgcattctggagacgagtgttgcttcggatggggtggcagctttggctttaactggctttaagtagccactccaaatccagccagtggccccattcttgctattgtgaacccagtagtaacgaacctttttgccgtgcatgataatatcagtttgctgagtcgttgtccagacggtgttgcaatagttcttcaaatcatgattggccctgaatgtccaacgattataattaccattagccctaaaggtatgtgatttggtatcggtcgtataataggcctttctagccgttgcccgcgttggcgtgcgatgatagtaagtgctggcattcgcagatactgaacttagcattgtgaccgctgcgatcattagtacgctccccagcaaccaattaacaatctttttcatgaaacccctcctagtaaaaatagccccgttattacaatttttatacaaacactataatactatttatctcggcggaatggataacaattttgactaaatcgcggcggtgtagggtgagtaatggttgtagctgaaaaaacagcgcgtcagagtaataggttactttgacgcgctgatttaatttgtgtattaatggttgcgaaccagtaattcagtcactagccggcgtaaagtttgttgtgtttcaccagttggtagctgatcgattaggttcagtgcggttttggtatagtgagtagccaattgttgtgcctgggtaacgccccccaaagcaatgacctgatcgcgaattgtcagtagctgttcattactgatgtggtcgccgggttggggtaattgttcggccaattgtggtccagcggtcagggcgtagataagtggcagtgaataaacgccgtcccgtaagtcattaagcaccggcttttgagttaaggcctcatcaccggcgtagtcaaggacgtcatctaacatctggtaggctaaccccatcctttcaccaatctgttgcgctagtttaacgacgcttgcgtcggcacccgcgaagtgggcaccttgttcacaactgaggctgaacagacgggccgttttgccacgagcaattgccaagtagtcatcgaccgtggtcgtcggatcgaagttatgtgccatttgatccagttcgccttggaggatggctcgcatcgccgcagtattgattttaacgtcgtcagctgtcttggcagcaatcaggacttgatcgaaatagcaggtaaacaacagatcaccggcgtaaatagcattacgttgaccgtagtcttggtggatcgttgtcacatggcggcgttctggcgattcatcaattacatcatcgtgaatcagtgttgccacgtgtagtagttccatagccgctgcgccagcacgtaaccgggccgtgttatgatccggtccaaattgactaaacaagtaaaagaagcccgggcgtaaaaacttaccacccgcagcgagtaagtcgtgtacgcggtcattaatggcggcgttatcaatttttacgttagtagctagatacggcttcagcgctgctagctcctttgcgacaagactttccggttgccaaatggtttgcatcataatcaaaataccccgctttatttgagagatggctccgggacgttttgacgccaacacttgcagccagtcacattctaaaatacaatctatattaaaggtacaaataacttgtttcgttgtcaaacaaaaggatggtgtaaatcattgaaaccaaaagtgtttcttgaatttgttgaaattaaatcattaattgcgagcgtgttaccgttcgttttggggagtatgtacgcctattataattatcatcagttacatcttggttatttattgctatttttcattgcatcttcactttttcatatggcgactaatgcgaatgataattaccaagacttcctacacgcgccacgtaatgacgacaatcaagaatttttgcaagagactaatgtggtcggtgttaaccagatttccattggtcaggcccggacgattacgtttggtttagccggaatctcattgattatcggactatggttagtaacacaaaccgggttgccgttgttgtggatggggctatattcatatgcggtcggttacttttacgctggcggtccgaagccaatttcacaaggcccgtttggcgaatttttctcgggctttacgatgggctttatgatcttctggattgccgtctttattaatacgtatgacacggcagccattacttggcagtcaacgctggctgttttaattgcgtcaggtctggccatttttgcaatttttaacattatgttagctaataatatttgtgatatggacgaggacattgcgttaggccgacacacgattttgtattaccttggcaaaccggtgatgcttcaggtatttgcatggagttacgttgctggttatgcttgtctggtgatcgcggtcttgatgggtgtgctgccaaagtttagtttactaacgttgctcagtattattccagtttggaaaaatacgcgggtcttcttgcacaaacaggtcaaacgagaaactttcacgatttcaattaaaaacgcaacgttgatttgtctttcatttatcgttttcatgggcttaggactgatttttaactagtccttcaataaacgagtatggctttgagaaagcgccaactaaccaagttgatactaagcagtatttttcccagcgagtccaagctggctttctgattttatggcttagggtttttcaatggtatttcacgggggtaaaaaaagcttggatatcgtgtgaaaaaacacacggtatctaagcttttttaatttacataaagatgttattcataactagttttcaaatggatagcggaagtcccattgtgcacgagcggcagtcatgatatccataacgtcagtcgttttagcaagactcgtgttgtgtaattcgccagcaaccattttttgcatgtcagcaatttcgtaattcatggcgttagtgctatcgccggctgtgatggtttcagtatggccttcgctgtcggtgaaagtggcactgtcggcacgtggataggtatcaacggtaaagtaaccattctcatacgcgacgataccgcgtttaggcattttagctcggaacgttaaggcaacggtggccagttcatcattggcgtttcgtaacgtgattgtcgaagattcatcgacgccactgctgaatcggtgcatggttgttccggtaatgtatggtttagcagtcaagaattcttccacgaaggctagggcatagacaccaatgtccagtaaagcaccgccggcaaggtcgggattaaagaagcgattagttgggtctggttctttaaaactaccaaagctagcttggatcattttcagatcaccaagatgacgttctgccgcaaaatcatggagcttctcgtataatggcatgtgatacagggtcatcgcttccgctaagataaggtggttgctagcagccacttccttggcgattgcgagttgggtactagacattgtgatggccttttcactgaggacgtgtttgccagcacgtaaggcgggtaaaatcgtgtcaatgtgataattatggggcgttgccacgtaaacgatgtcgacttgttcatcagccagtagctcgtctaaattaccataagctttgggaatgttgtgttcggcagcaaaggcgttagctttttcctgcgaacgtgagcaaacggcgtagatttctccgtcaggttgatcaaaatatttaacgaaactgtgcgcgatgttaccaaggccaacaatggcccagcgataagttttcgacattataggttcctcctaggattaatcgaatgtgaccacttacattttagcaaaaaaataaggaattggcgcccaataatcatgtaaaattaattcaaaagtcggtaaaatagagtgtaatatgaccgatgctcattgcgatttaggcttacttagaattaaaacatgttggttagttggattcttattcgtcagcacgtgcgcgtcttatgccgactttcggggccgggtgacaattactggaacgcagccgatgtcgatttgagctaacgcccaagccgcttcatctcaaatacgagtcttattctaagcacgtttacgctaactcgaactttttacagcgggcctaagctggcagctttgaactaagaaaccagcatgttttaatcctaattcatgataaatgaacaggtgtaatctgtaaggtaattaccagaaaggaggcggctatgatggcgggtaagcggcgaaaatcgcgccggaagcaacggacaaagacacaattatttgtgaagaagggccgccttcagtgggtcaatatcttattagtgttggcggcgatggtggggatggtttggtatattcagcataattgggcggttaagtcgcgggttacggcgacagcacctacaacaacgcatgcggcatttattaaaaagctagtaccagctgcgcaacagcttgatcagcaataccacgtgctggctagtatcacgctaagtcaggcgattttggaatcggattggggacaaagtaccaatgcgacagagaataataatttatttggggttaagtccacgtcgggacggctcatgacgacgcaggagtattatgacggggcctatcatacggtcaaacggcgcttcgccgtttatgatagctggcacgcttcgctggtcgatcatgccaagaaattggcgtacggaacgacttgggattctcagcactacgctgcggtgattaaggcaactgattatcagacagctgcgcaagcattgcagacggctggatatgcgactgatccaagttatgcacaaaaattaattaatattattcaaaaatatgacttacaacggtatgatagaaagtaatgaaattaatagcagtatttcaatgtcgcttataattctaggagggtactatgcgagaacttgaagaacgcattttgaaagatggccgggtacttcccggtgaagtattgaaagtggacggctttttgaatcaccaagttgatcccgacctgatgtttgccatgggaacggaatttgcccacttgtttcaagatgcgggtgtaacgaaaatcttgacggttgaatcatcaggaattgcgccggcagtcatggcggggttagcaatgcacgtgcccgttgtgttcgcacgtaagcacaaatcagtcacgttaattgatgatttatatacagccgaagtttattcttacacgaagaagacgtctaaccacatctcgattgccaagaagttcttacaggcggatgacaaagtcttgttaattgacgactttttggccaatggtcaggcggttcaagggatgtttgaaatctgtgataaagcgcacgtaaaaattgcgggtgtcggtattgtgattgaaaaagtcttccaaacgggtcatcaactgattgctgatcggggtgtccgtttagaatcactagcacagattacgtcatttgatggtgaccgggtgcactttgcatcggaggacacccaggcttaagttaagaaagcgggggattgtgatgcacattgacatggggatgctagtccttattttcatcatcaactttgcttacattacgttaaacaccgtacgttttttgcttgtaatgcggggttatcggtattttgcagcttttgcaagtgtcattgagattacgatttatgtgctaggattatcattggtcttaaatcgtctcaataatccgattaatttagtcgtatacgcgttaggttacggtgtcggggtgtatgttgggatggtaattgaagatcgattagcgttagggtatacaatgatttcagtcattttacctgatcccaagtcgtcgttaccgggagtgctccgtgaaaatggctttggggtcacacaacacgctgcttatggcttagaaggtgagcggctagaactggaaattctggccccacggaagaacgaacggcggctgtatggcctgatcaaagacgcggcgcccaatgcgtttgtgattgcgtatgaaccacgctatatctccggtggcttttggctcaagcgagttaagcgacgcaatgctcgccgaaaaaagcagtgataaacttgcaactgtgcgtgtcagcaagtatgattgttacaggataatgagcgttaaaataattcaataatcagattataattatttaaagcataggaaagtagggactgaagtggacaactcgattttaaacccaggtggtacgcttggcattattggaagtagtactaatggtgttggattagtaattgccgcgcgtaatgctggcatcaatgtcggggtatacggcgataacgaaaatactgagaccatggaactggcagattttcgcgttgtcggggccctcaatgatcaacaacagttacagaacttcgcagaacgttgtgatatggtgacttacgagtcggaaaccattgatgcgtcggtcattaattttttggcggcccatacccgggttccacaaggcgccgatgcgcttgagattacacaggaccgctctttggaacgggcgtttttcagccaacttaacttgaatgtagcaccgtcagcgacaattgtcagtttggatgatgtctatcaatcgatcgggtcaattggatatcctagtattttgaagccgattcaaaagggcttgggtcaaaatcggcaactggtcattaagacgcagacggatattgtcaaggcggctgatctgttggattggggcacatacttgttagagtcattgattccatatgataaggaactctccgtttttggcgctaagagtggtgatacgacagctttcttcccaaccgttgaaaaccggtatcgtaatcatgagctagttgcctcgattgtgccagctcaaattgattcagctgtgaatgacgaaatgctgcggatcacaaaggaaattagtgataacttgagttatacgggtgtctttgaagttgccttcttcttaacgaagagtggtaatttatacgtgaagcggattgtccctgcgatgcatcaggcgggttatgtcttcgaacgtgctacgaatattagtatggcagaacaacacttgcgagcaattgcgggactgccgttaatgccagtcaagcagttgatgcccgtggttgctgcttactttacaccggctcaggagagtggcattcgcacgcagtggcagattaagacgaactggttctttaatttctatcaccgaacgttgttacaagcgcaccgggcaccagtcgctggccacgtgctagtcgaagcaccaagtgttaaagaagcactcgaacagatcgaagacacaagtatttggcagtttgggcaaacgacgccggctgataatgaacctgaagctgagtagtgtatgatcagaacctagttttacggattattacggttaaactaatcgtactgttcgcaccgggtgaccagctattatgggtaaccgtcgtgaataaataaagttcgaaatccaattcattttgtgaattggatttttttagcggttggggagaagccagccaaatggcgagatacggttatctgagggggaatcgttgagattggcgtggcgggtattttggttagaaattgagggagtctcaaaattacttaaagttacgcaatattgccgtcaattcgtttcccgtgaatagtagaagttgtaaaattaacataggtgtcactgacaatggaaaaaccgcgatttttgtatgagatgctgaccttaaagtacagcaatcacggccaaaatttgctataatgtttggtgactgatttttagaaagggtggcgaacagcgtgtcgaaagaaagcctattggcaggaatgaatgacaagcagcaagaagccgttttagacacagaaggaccgctactaattatggccggtgcgggctcggggaagacccgtgtattgacgcaccgggtagcttatttaattgaagagcaaggggtcaacccctggaatgttttagcgattacgtttacgaacaaggccgcacgcgaaatgcgtgaacgggttggtaagctgttaggtgaatcggcgcaggaggtctgggtctcaacgttccatgccctgtgtgtccgaattttacgacgtgacattgaacaaatcgggtataaccgagcgttcacaatcgccggcactagcgagcaacggaccttagtcaaacgaatcttgacggaacaaaatatcgattcgaaaaaatttgatccacggtcaatcttatccgcaatttcaaatgcgaaaaatgacttacaaacgccggagatgtataaagaatcggctgccagtccctttgagagtgtcgtggcagacgtttatttgcaataccaacgtgaattagcggctgatcaagccgttgactttgatgatctgatcatgctgacgattcaattattcaagcagaatccagaaacgctggcgtggtaccaaaacaaattccattatattcacgtggatgaatatcaagatactaataacgcacagtatacgttagtcaacttgttagctgacaaatataaaaatttgtgtgtagttggggatgcggatcaatccatctatggttggcggggtgccaacatggaaaatattctcgatttcgaaaaggattatccgcaagctgacacggtgatgttggagcaaaactatcgttcgacaaagacaattttgtcggcggctaatgcagttattaacaataattcaacgcggcggccgaagaaattatggactgagaatgaaccgggtgacaagatttcttattatcgtggtcagagtgaaagtgatgaaactcactttgtcattgccaagattcaagaaagcatgcagcaggacaaaatggactacggcgattttgcgatcctttatcggacgaacgcacaatcccgggtaatggaagagtcactcgttaaggcgaacatcccctatacaatggtcggtggtaataagttctatgaccgtaaagaaattcgggacgtcttatcctacttgactttggcagtgaacgatcaagattcaatgaactttgaacgggtcgttaatgaacctaagcgcggcattggtcaaacgagtgttgaaaaattgcggttgttcgcggatgaagcgggttattccatgttggaagcagctagcaatgttgatatggctaatggcatttcagcacgagcgaagggtgctttagcgaagtttgcagcgacaatgaatgaattgcgcgctatgcgggaatacttatccgtgacggatttaacacaagagattcttgaccgcacgggttacatgaaggcgttgaaagatgctaaggcaacgaaatcgttagaggcacaagcccgtatcgaaaacattgaagaattcttgtctgtcaccaaacaattcgatgatagttatcaacctgaagatgaagatagtgacaaattcgtggacttcttagcggatttagcactggtttcggatgtggataacgttgaggaagaaccccaagccgtgacgctgatgacgttacatgcagcgaaggggctagaatttccggttgttttcttgattgggatggaagaaggtatcttcccactgtcccgggcaatgatggatgaagacgagctggaagaagaacggcggttagcatacgttgggattacgcgggctgagaagaagctgtacttgaccaatgcatactcacggatgctttacggtcggcggcagaataatccggcttcccgtttcgttgaagaaatcgaaccagaattactcaaaaatgaaaatacgttggatggtgcaagtagcactggtcctaaagttccatttggtgcggatcgtgaacggcgtgcttttacaccttcatataaaaagaatccagtggggacgcgggccacggtcaagaaggctagtggcacgggtgctgacaagaatagttggtcgatcggtgataaagtcaagcatcgtaagtggggaaccggaacggtcgtgaaggtctccggtgctggtgaagatgctgaactagacattgctttcaaatctgaaggaatcaagcggttattagccgcatttgcaccgatccaaaaagtacaggactagttaggaggactggctgatggcggacaaacccaacacaatgacggttgagcaggcggctgatgaagcggctgctttacggcaaacgttaaatgaatggcgtcggcagtactatgacgaagatgcgccgaacgttgaagatagtgtgtatgatcaaaagtatgaacggttggtcgaactcgaacaaacttttccacagctcgttacaccggattcaccgacgcaattagttggtggaacggttaaagcaggctttgataaagtgacccatgagattccgatgttgtcattgggcgacgtcttttcacaagctgagttacaagagtttgttgatcgcttggaacaaaacgttggtcatccagtcgattataattgtgagttgaaaattgatggtttagcgctgtcgttacgttacgaagatggggtgctcgttcaagggtccacgcggggtaacggtacggttggcgaagatattacggctaatattaagacaatcaagtcgattccacaacggttgacccgaccactgacgatcgatgtacgtggggaatgttatatgcctaaggcagcgtttgctgccttgaatgaacgccgagaagcagcgggagaaccagtctttgcgaatccacgcaatgctgcggccggtacgttacggcagctagattcacgagtcgtggcggaacgacagctcagcacgtttatgtataacattgccgactacgaaccgttaaccgcccgtacgcagagtgacatgttaacggagttcgcagatcttggttttgccatcaatcctgactttaaggtggcccattcgatggccgatgtctttagttacattgaccattatcaaaatgaacggccagaattagcatatggcattgatggcatcgtgatcaaagctaacccgttaccgctgcaacgctcactaggagcgacagtcaaggtgccacgatgggcgattgcctttaagtttccacctgatgagcagccgacccttttaaaggatgttgaatggaccgttggccgtacaggagtcgttacgccaactgcggttatggaacccgttcaactagctgggacgacggttgcgcgggcttcgttacacaatcccgattacgtggcggccaaagatgtccgcatcggtgatacggtcttgctacacaaggctggcgatattattccggaaatttcatcggttgatttagccaaacgacccaaggatgcgcaaccattagttattccaaccacgtgtccgtcttgtggggcgccgctggttcatttggaagacgaagtggctttacggtgtattaacccgaaatgtccagcacaagtccaagaagggctggttcattttgcctctcgcaatgccatgaatatcgatggcttgggaccacgaatcattgcgcaactctatgcaaatcggctggttagtgacgttgctggtttgtaccgattaactaaggcacaactgttaacattagataaaataaaagataaatctgctgaaaagctcttgacagcaattgaccgtagccgtgataattcacttgaacggttattgttcggtcttggtattcggcacgttggtgctaaagtggcgcggttaatcgcgcagcattttgggacgattgaggcgttgatggcagctagccaagaagagattgcggcgatcgattcgatgggcgatgtgattgcgaacgcagtggttcaatattttgagagcgacgaagttcatacactcatccgcgaattgcaagcagtcaacgtgaataccacttatcaaggccctagtgccaccgtggcagaagatagtaacagttggtttgcaggcaagcgggtcgtgttaactggtaagctggaaagctttacgaggccagatgcgactcaatggctacaagctcacggcgccacggttacgggaagcgtctctaaaaagacggatctcgtgattgcaggtagcgatgccggaagcaagttgcaaaaagcacagcagctggacattactgtatgggatgaagcccggttcagcgaaacaatgagggaggatgcacaagcgtgaatgttaaacgcatacgcacgattggcttagtggcagtagctgccattgttctagccgcctgcggtaatttaaagaattcgtcctttgggtcgactagtagtagcaccacaacgaccggaacgaaaacaacgaccaccactggaactgctgatagtgagttctatcaaggcgtcatcaaaaatggccgttatcggacgagtaagtcgcgaggcgtggtcgtttcgcaaaatgataacgtcatgaatttgaagagcttcgaaagtggcttattggacgtgtctaaaaaggtctttccaacgagtaagtatgtctttcaagaagggcagtatttgagctcatcgacagttgaaaattggctcggacggaaatcaagcagcaattcggagggcttgaacccagagaataacggtaagaaggatccgaatactcggaatccgatttacttacaacagcttgaagaacaagattatatggttcaaaatggtagtaagttatcgcttggcggggtcacgattggcttgggaatgaactcggtcgattattatactaaggtcgaatatggggcaacatacgaaacggacatctcaacgactgagttaacggcgcaaggtaagaagatggcgaatactgtcttacagcggttgcggcaacgttcagctttgaagaatgtgccgattgtcttggcactctataagcagtcttcgaatgatagtttagttgggggcgacatgattgcctacgcggtttctaagaacggctccacttcgatctcaaactggacgtcgttgaattggaagaattatgtcttcccagcgacctctgagtcaaagaactcaggtgcgaatagtaatgatgagtcggactttagtcagtttaagtcccacgtgcagaatttcttcccgaacttgtctggcgtaacggcgaatgctcattacaaggacaaatcgttgagtaaattaagtgtcaacatcacgactaagttctacagcgaaacggaaatcatcagtttcacgcagtacttagcaacggctgctaaacggtacttgccatctggtgtaccggttgaaattacggttaagagtgccaatggtgacattcaaagcttcttagccagaacggcgaagggtagttcgtattacacccatgtctttagtgaccagggcgacgattaaacaataatattgagtaagatttgagaaagaaggaaatctgatggctgaagaacgaattaatgccgaacaagtgcaacacgtggcgagcttagccaaattggagtttacaccagaccaattagcgatgttcacaccgcaactagaaaaaattatcggcatgttcgaagaattaagcacagttgataccacgggtgtacccgttacgtcacggatgagtgatcatacgaatacgctacgtgaagacgtggcagttaagagtgatgaagcactccgggaagcattgctgaagaatgccccagaaacggccaatggcttgatcaaagtgccagcaattattgatgaaagtggggacggtgaataatgacttatttcgaccaagatctaactagtctacacgctgacttggtagccaagaagatcagtgccacggaactagcgaaggccacttttgcgaatatgaatcaggttgaccctaagctaggggcgttcttgaatttaaatgaagaacaggccttacaacaggcggctgctttggatcagaatggcatcgacgcgaacaacgtttttgctgggattccgatggcagtcaaggataatattgtgacgaagggcctaacgacgacggcggcttctaaaatgttggaaaacttcgtgccggtctataatgccacggtggttgacaaactattagcaagcaacgcgttgatcgttggtaagaccaacatggatgaatttgccatgggagggtcaactgaaacgtcggcgttccatgtcactcgtaatccttgggacatcagccgggtgcccggtgggtcttcaggtggctcagctgtcgcagtggcttctggacaagtgccagttgcattcggttctgatacgggtggttcgattcggcaaccatcatcatttaacggaattgtcggtatgaaaccaacgtacggtcgggtctcacgctgggggctgattgcctttggatcttcattagatcaaattggcccaatgacacggacagtcaaggataacgcggccgctttgaatatgattgcaggtaacgatgtgcatgataccacgtcatccaaacaaactgtaccagactttacggctggtttgacgggtgatatcaagggtatgaagattgggttaccaaaagaatacatgggcgacgggatcgatcctaaagttcgtgaagtcattcaacaagcagtcaagcagtttgaagacttaggtgctacggttgaagaagtctccttaccaaacagtcgctacggtgtggctgcttattacatcattgcgtcttcagaagcttcttcaaacttacaacggtttgacgggattcgttatggtttccgggctgacgatgttaagaatttggaagatgtctatgtccgtagtcgttccgagggcttcggtgatgaagttaagcgccggattatgttagggaccttctccttgtcagctggttattacgatgcgtacttccacaaagctggtcaagttcggacgatgattatcaatgactttaataaggtctttgaagattacgatttgattatgggaccagttgcaccaacaccggcctttaagttgggtgacgaattatctgatccaattacgatgtatatgaacgatgtcttgacgattccagtcaacttggctgggttaccaggaatgtcagtaccagctgggtttgcagacgggttaccagttggcttgcaattaattggtaaggcgtttgatgaaagcacaatgtatcgagcgggctatgcctttgaacaagcaacgcaagtttacaagcaaaccccgaaagtcggaggtgctaactaatgaattttgtaaccacgattggtttggaagtccacgttgaattaaaaacgaactcaaaaatctttagtccttcacccgtgcaatttggttccgaaccaaatgccaacacgaacgtgatcgactgggggtatccgggggtattgccaacgcctaacaagggcgtggtcgaagctgggattaaagcagcaacggctttacatgctgaaatcgaacatcacacgtactttgaccggaagaactatttttacccggataacccgaaggcctaccaaattacgcaacatgaaaaaccaattgcgcatgatggttggattgaaatcgaagttgatggtaaaaagaaaaaaatcggtatcgaagagatgcatattgaagaagatgccgggaaaaacacccatgaaaacgactattcctatgtcgatttgaaccggcaagggacaccgctaattgaaattgtttctaagcctgacattgcctccccagaagaagcttatgcttactgtgaagcgttgcggcaacggatccaatttacgggcgtttcggacgttaagatggaagaaggttcaatgcgggtcgatgttaacatttcaattcggccggccggttccgacaagtatggtgtgaagaccgaaatgaagaacttgaactccttcaactacgtgcgcaagtcgttagaatatgaagaacaacgccaacaacaagttctcatggcgggtggcaagatccaacaagaaacgcggcgttttgatgaaacaacgggccaaacgatcttgatgcgggtcaaggaaggtagcgatgattaccgttacttcccagaacctgatattccagcagtcgatatcgatgatgactggattgcatccgttaagaagaccattccagaaatgcctggttcgcggcgtgaacgttacatcaatgaatttggtttaactgcttatgatgcgggtgtgttgacccaaactaaggaaatgtctgacttctttgatgcaaccgttgctgaaggtgcggatcctaaattagcttcaaactacttgcaaggggacgttaacgcgtacttgaacgagcataaagttgatttgttagcgactgacttaacgccaactaacttagctgggatgatcaagatgatttcagatgaaaccatctcaagtaagattgctaagaaggtctttaaggccattatggcgggctcagaacctgtccaatgggtcaacgacaagggcttagtccaattgtctgatccggcgaagttacaaccaatcgttgacgacgtattggataataatcaacaatcaattgatgactttaagaacgggaaagaccgggccgttgggttcctcgtgggtcaaatcatgaagaagacacgtggtcaagctaacccgaaagtcgtcaaccaactattaatgacatcattaaaagcacggtagaagcgttggtcgataaggtgttgagcctcgattgatgcatgtccagcgttggggtagagatgagacgctgaacgcttgaccgtgtgagcggaggaataggaaacatgcgtaaacgggcacgacttatttataacccgacttctggacgtgaggcattggcccacgatttagttgaaattcttggtatctttgaacaagctggttatgagaccagtgcgttcgcaacgacgcccgcccctaattcggcggctgatgaagcgcgacgttgtgccaaggacgggtttgaactgattgtagcagctggtggtgatgggaccatcaatcaagtagtaaacgggttagccgggttaaagcggcgacctaagatggctattattccggcgggtacgaccaacgattatgcccgggcactgcggattccgcgcaatgatccggttgcggcggccaaggtagtcctaaagaaccagacggttaagatggatatcggtcaggctggtgaacagtatttcattaacattgcggctgggggcatgttaacggagctgacctatgacgtaccatcacaattgaagtcgatttttgggtacgcggcatacttagccaagggtgctgagttattaccacgagtaaaaccagttgagatggatttgaaatatgatggtggtcattatcagggcaaggcttcgatgtttttcttagcgctgactaattcagttggtggctttgagcagttagtgccggacgcgtcattagatgatggtaaatttaccatgattattgtgaagacgagcaaccttgctaaaatgcttcacttaatgacattagtgctcaatggtggcaagcatatcaatgatccaagcattatttatgtgaagacgagcaaggtcgtcgccaaaccagctgacaaggatcgcttaatgatcaacttggatggggagtacggtggtgatgcaccgatgacgttccggaatttgaagcaacatatcgaaatgtttgccgatacggatcggatccccgatgaggcaatcacggatacggatccagagttggaagacgctgagcgacactttgtctcagctgttgatcagttgccagctgcaactgaggacgacgaaaaaacagaataacttgcttaaattaccgtttaccgatacaatggtggacggtaatttttttaaaagtgttaccgtcacagggacacgattgagcattgcctgacgatttaatcgtttgtcggtttagcaatgatttgtcagtggtgcaaagcatgagacagctcaaattcgcgcgttttgacactcacagtaagcaatttgaatagcatgtttaatcagtaaatgttaacgacactgccaagtgtggcagtattaatggccatatcattcgctgcccggagcagtggctaccaggcagtaactaaaaaataataagtcactaacaaagaaagcaagaggaaacaaatgaaagttaatttaccagtgcacaagggtgaagttttagacgtcactatcatggatttaacctatcagggtatgggtgttgctaaagtcgataattacccaatctttatcgaaaatgcattgccagaagaaaaaattacggtcaaggtcacgaagacgacgaagaactttgcgtttggtgatgtggaaaagattaaccaagtgagtcctcatcgggttaatcctaaagggcgcgtttatcgtcaaaccgggattgcaccactacaacacttggaatacagtgaacaattgaagtttaaacagcaccaggtggccgaattatttgcaaaggtccacatggatgatgtcgaagttttaccaacgattggtatggccaacccgacgcagtatcggaacaaggcccaagtacccgtacgacaagtccaaggacaactaacgactggtttttacaagaagaacagtcatcaattgatgccaattgaagattattatattcaagatcctgcaattgataaggctatcgtggtagtgcgcgacattttacggaaatatcatgaggcagcctacgatgaattccatcatagtgggacgattcggacgatcatggtgcggcgtgggtattacagccatgagatgatggttgttattgtgacgcgaacgaaacacttaccaatggctgacgtggtcacacaagagattcaagcagcgttacctgaagttgtcagtgtgattcaaaacgttaattctaagaagactaacgtgattttagggccagttaacaacgtgttagctggtaaggccactatcgatgatcagttactgggcctgacattcgccatttcagcccagtccttctatcaagtgaacccacaacagaccgaaaagctttatcagttagccattgatcaagctggtttgacgggtaatgagacagtgatcgatgcttattccggtatcggaacgatttcgttaacaatggcccaacatgccaagcaagtgtatggtgttgaaatcgtgccagcagccatcgataacgcacggcagaatgcggataagaatggtattacgaacgcgacctttgttttggatagcgctgaaaaagccatggctaaatggcaagcagatggcgttaagccggacgtgatcgtcgttgatccgccacgtaagggcttggacgccgactttatcaagagtgccggtgaaatggcgcctaaacgggtggtttacattagttgtaacccatcaaccttagttcgagacgtccaacggtttgcagaatacggctaccatattagtgccccagtccaacccgtggaccagttcccacaaacaccacatattgaatcggtaacggtgttagaacgcgaacaataagcattttaaaactggattattaatgaaattatgaaaagtgtgttgggtgcctgattatttgtcgggtaaccaacacacttttttactcagcttgagggctaactttgaattagaagcacaaaataaccgtttttaagcgctgatattgatttgaattcgtccgattttaatagacagatcatttagaatcggctaataaaacagtttattgataattataattattgctttaaataatttaataaataatgcgctgtaattgctgtaaactagttcactggagctgtttgagtcaaatttagcgtattaaattaaataattgtatttattggtcaaaaaacacccacaaaaaccatcaattgtattacttttgataaaagtatgtatttcatctcggtttttgaccagtttgggttataatgataaacgaaataaaccgataaatgggggagcatgatggtaaagagaagaacactgacacaggcaaaagtattagcaacagctaatcagttaattgaaagcaagggaattaacggattaacaattcgggatttagcgttagttttggatgtgcggccgcaatcgatttataattatgttgatagcttgagtgatttattagatcaggttggcctccaatttgttcaaaatgttgcggatcgtttaactgaaacaatctcagacgttgacggtgatgaggctttgatggcatttgctcaagaattccgggcggcctgcaaccagcatcgggggttggcaccgttattacttgacttaaatgataacctaagaatcccacggtctcgtaaagcaattgtgcagttataccaggatatgtttaaaccattacaattggatgattcggcgcgggtggagaataccttgtaccgttccacgttgttcggattcattatccaagagattggcggcttctttaagatgcaggggactgaacttgatgaacggttcacgaaggtgatgcagttagcgattgaccagacacacttacctgctgataagacgaaaaaataatttaagattcagtgcggctatcttagcagatagccgtttttttataggttaaattcgccaatatttagcagtaaatggggcgtaatacaataatctttgttaaggctgaaatcaaaatcaataatgatttattgaagtaattttatgatcaatcgtaatgaaaatcttaattctgcatggtaaacgctaaattagggcgttattttagccccaggcttaaaaaatcgtttacaataaggttaaagttaattttaagggggcccaccatgtcggaacgttatttatcagcaattgaacacgggttaacgactaagcaagttgaccagcgcctgacagcgggtctaaagaatgagccgttaccgcccttaacgcggtctgttaaacagatttttcgtgataatttgctaacactttttaactgtatcaatgttttgttagctgggttagtttttttgacaggaagctataagaacatgctgttcttattcgtggtcatcgtcaacacggccatcggtatttttcaggagattcgtgccaagcgccaggttgataagctatcactattatcggccactaagattcaagtccgccgtgacggtcaaacggtagcgatcggtcaggacgaaatcgttcaggatgatttactattagtgacccgtggcgagcagattcctgtggacgggctcgtgcgggcgaccgctggattagaggtcgatgagtcccagattacgggtgaggctgatccggtcattaaggggccgggtgatgagttggtttctgggagtgtcatccttggcggacacggaatcgtgcaggcgacgcaggttggtcacggtagttttatcaagcagatggcgcgagcagctaagcaaaaacggcggacgccaagtcaactgttaacgattatcaatcgaattatcaaaattttgacctttacgattattccactaggtgctggtctgttcatttccactatgatgcggggtgaaagtcagaaccgggcaatcctcgggacggtggccgcgatggtcgggatgattccggaaggactggtgctgttaacgtcagtcgctttagctgctggggcgttcactttaggccggcaccaggtattggtgcgggagctacccgccattgaagcactggcccgggtcgatacgttgtgcctcgacaagactggaacgattactagtggcaagttagtttttgaacgcgttgagccgtggaaccagcatgatttgacagcagtggagcaccggttagctgcgttagtcactgctattgatgatgataatgaaacggcccgggccatcaagactgcttttggtcagccaccagtgcaagcgacagaagttcttcccttttcttcaagtcgtaagtggagtggggccgcgtttgatggtcacgcttacgttatgggcgcaccggaatttatttttaccacggtacccggcgagttacagtctcgcatcaaaacgctcgcgcaacaaggttaccgggtattagtgttagccgaagtggccgccttaacgacgcccaaaccgactcgaccgatgactttgggattaattctgattacggatgagttgcggccacacgctaagacgacgtttggtttttttgctaatcaagacgtcgccctaaaagttatttctggtgataatccggtgacggtcgccagtattgcacaacgggctgagatcaaggacgctgatcggctggttgatatgagtcaagtggggactacccccgactatgatcagctagtgacaaattatacggtgttcggtcgagtgacgccgcaacaaaaagagcaactaattaaagcctatcagcgcaacggccataccgtagcgatgactggtgacggcgttaatgatttgttggcgctgaaacaggcggattgtagtatcgcgatggcgagtgggagtgaagccacgaagagtttggctgattttgtcttaatcgattcgaactttgatgcgatggtgcaagtgctgaacgagggtcgccgcgttatcaataatattgaacgggtcgccgcgctctacttgattaagacgatgtattcggtcgctctgacgttgatttttatcttcatgagccacagctacccgtttgagcccatccaattaacaccgatttcatcgttgatggttggtattccaacctttttcttggcgttacagcctgattatacgcgaattaccgggcgctttatgaaacaggtgatggagattgccgttcccgcggcgatctgcgtggtcggctatatcatggtcatcatggtgttaggtaataagttccagctgaatttcgaaacgaccgcgacattgagtgtgttgatgaccgggatctttagtttaaatgcgttattgattgcagcccggccgttgaaccggttcaaaattgggttagtcgtgttaatggcaacactgttcgtcctagtctttttgtttgccggccgaattttctcattggttaatctattagattggtcgttagctgtgatttacctaccactgatgatcagtgcgtatccggtgttcattgttctgcaaaatggcttaggaaaacgcgttctcagcaagatcaattggcgataatcgatcaaatttaggtgacggggccacgctgcaattacggcgtggccttttttggtgtaatcagattgctgtctcagcgtaagccacaccgttgttgaccagtcagattaaattaacaatccgatataagtatggttgataccagcatagcatgtaaatttataacagattttaataggcagcagcgtctaaaacggcttataatgaagttcagtagattaccggaatgggggcggtattgtgtggcttgatgaacaacggttaattcaacggttagtgccgcgcttgttgcgttttcggcaaactaacttctatcggattattcaacggaccttgatgttgacgttcccattcattttgattgggacgttcagtcaaatcattcaactgaccgtgttgacgaaaacggggtttattgccagtatctttcacctgtcaaaatgggtcccatactatcgttacttacactatccgtttgatagtttaacaaccttgacgctcaacggtgtggccgtagtagcagcatttggtgcggcaaaataccatgccaaactcaatcagcgcgatgaccaactagcgggattgaccgccgcgattgcgctattgatcgtggcttatcagtatacgaatcaaaaccaaattggtgtttttaatactttattgatcgggactaacggtctaacgggcgcattgattgtgggtggcttgaccggcctgtttttcaaatggttcagcaagccggttccggcacaaagtagtccgcatatggccgatatcttgacacggactttcagttcactacttccaatggccttaatactagtattggccgtgctagtgagcctcgctttgaactggctgatgattattacgtactctgctgaaagttggtcggcatttcaaaagtacgcaacgactagtcacagtctgtggctgacctttggcatggcagttgtgacgctgttgttagaaattcttggactagctggtccgtaccaagaacgcttggtgaccaacagtgcgacaatgacggccaatttgaattatgcactcacacatcactcggcgtatcacgtgccgtatccgtatacggccaacacgttgtatcacgcatttgggacgtttggcggaacggggatgttgctggccttagtgattgccatttatatcggtagcaacaatcataactaccacgtagtcgcgcggtggagtctattacctgcgctctttaatagtaatggaccgctactgacaggcttaccagttctatataatccaatctatctaataccatttgtgcttgtgcctgtcgtaaatatgggactggcggcgctggcaattgggtttcattggattccacccgtggtttatccggttcccgtgggtacgccgggaccgttgattgcctttatcggcactaacggtaacgtggtggcacttttacttggtatcgttgatttggcactatcagtggtgatctatttgccgttcatgcggttggcggaaaccattgtgcaggcggcgcaagcacaggtggggggtgctaagcatgtataatcgacctaattggcagcgacggcggcgaagtctgttagtgcttgtattaggcttactatttctgggctttttgattcagccctcataccagtggacgaaaaccaacgtggctgcgatggcaggacgccatgattcgcagatgtcaccaattattatgattcccggcagtagtgcgacccagaatcggtttgacaccttagtcaagcaacttaataaggctgatcatcgtcggcatagtttaattaagctgaccgtgatgacggatgatacgattaaaatgacggggtcgttgcgtgcccgtgataacgagccaatcatcgtcgttggctttcaaaataatcgtgacggctatgataatattaagcatcaggcccgttggttctcactagcctttaagaagttggctgccaagtatcaattcaataatttcaaagcaattggtcactcgaatggtggtttgatttatacgtactactttgaacactattttaatcgcgacgatattaaggtcaaacgaattatgaccattggctcaccttacaatttctcagaagctaatttgaatcataagacacaaatgttagctgacttcattaagtaccgcgatcgattgcctaagtcggcgacgatgtattcggtcgcaggtaccgaaaactatgattcagatggtcttgttccagcgcgaagtgtcgaagctggtaagtatatttatcaagggcaagtcaagcattttacagagattacggttactggtacggatgcccagcactccgatttacctcaaaatgcgcaaattgtgacgttgatcagaacttacatgttggataagccgaaacagactcgtaagggcttagtatcagttggcaccacagaatgaatggtaacaaggtctaaccgctgcggattggtcagtaatcaatggcccacaacgatagcatttgtgaggaaatttagggtgttattaagaattgtggtaaaatttggtcatggaggtggccgaaatgtccacacaatcaccagtacatcgcaatcgggtcctgactttaattcggtcttattatccgaatctaagtgtgacggaccgcaagattgccgattatattattgccgacccaattaaaacggcagctcagtcgatttcagacttggccgcagcggttggcgtttcaacggccacagtttcacggtttgtcaaacggattagttttagtagtttccgggacttctcacgtgaactaacggcggccgaaccgattgaacaaactaatgctgaagcttttcaagatgtcgaaaaacaaacgacttttaaaggaattgcggaatcaacattcaatagtattcgtagttcgctagatcagacaagtcaggtaatgacggaagcggacctcaagcgggcagtggaattgttgctgaatgctcgctcgattggtttttatggtctcggcggctccgcagtcgctgccctagatggttatcataagtttgtgcgcaccggtattccgtgcgctcataatagtgactatgatatgcaactgatgcaggcagctcagatgaacgctaatgacgtggcagtggtgatctcacatactgggcgtaatcagcaaacactacaagtattggctaccctgaattcacaaaacgtgccaataatcgcgttgactagctttggtaattcccccctagccaaggacagtactgttgcctttatttcagttgcagaagaaattaattatcgttcggaaggactaacttctttgattgctcagatgagcattatcgatagtctcttcttgatgactgctgtccatggcaatatcgaaatggcagaaagtcttggccgggttcgcgaggccattagtcaaacgcgaacagagctttaatgctgtaggcaaaggattgatgagatgacaaagcggcaacattatcgaccagtatacgcgaaaacgcggtggcgttaccgaattggctggttattagttctattagtgattatgggcagtgtttggggcggcttggtctggctacgttggcgcagtaacgctgtcgtgagtggcttcaatgtgcgtggagttgccgtgtcacaaaatgacggttatttagactttgcgaccttgcaaaatgatggcctcaagtttgtctatctacatgccactcaaggggctagttatacggatgataacttcgcaagtaattatgagcgaatcgttggtacgagtttgggcgttggcgtgattcacacgtttagtttttcatcgactgctgcggcccaagcggcctatttcgagaaaacggtcggggatagcgtcggcaatttaccaattgcgattcaagtgcaatactacggtgactacacggaccagacgattgcggtccgaaaaagtcgtgctaagcttaaggcattagtgaccacgttgaaccaggattataatcgctcctgcgtcgtatggtcaacgcccgcagttgccaagcagatcgttaagcccgcactaaaagacactgacttatggctggacacggcgaagacccaccaacagggacgacgagtgatgtttatgcattattccgatcgcgccgtttaccgccagaacgggattcgtcaagagttcgctggaattctattcaacggtagtgtgacagcgtacaataaagttgtggcgcagggcttaaattaaggcctaatccttgaataatttatttcgcaaatcaaattaacagtttattagctgctaggctgactaaaaataagtcgcaagttcaagactcttcttgaacttgcgacttattttgatggcgacctattaaaatccttaggacgtcactagcgtcattaggtatttggcgataagatgacataactgcgatcatcggcttcgtcaaagagggttacaggtcgttgctcattagcccgcacctcaaggtgaaatccatattgatcaagtaagacgagcgcactcgatgagatggattcgacggtggctggtaccgagcgcccgtcgatgcgaatcatcatgttgggatcaatctccaacgtgtggtcccggtgatgcgcctcatcacgataggtccaagttcccgcgtagaaaaccgctaagtcaccgtcagcgatcgtactagggtgccgtttgtggagtagtgtactagaaagtcctgcaagtaatgataaaccaaataatattgcgccacgccgcttcactggatcaaccttctttctgaataaatctatagttaaaatataccactaaaacggcgttaacgtcacgtaataagtggattcttattaaagcctttatgtcactgttacctgcgggtaatgaacgtaatatttgatcaatttcggaagggcggtaactaatttttttgaattaatttgtgttctgattggaaattactgggtgagtgtgttaatctatataatgtgattggcatttatgtgaagttttaaagtatcatttaattgtgttaccgtaaattctttataggtgttaataacatgtgttagttactttttatttttatatcctaggaggatttagttcatgaaaaatggtactgtaaaatggttcaatgctgataagggttatggctttattactggtgaagatggcaacgatgtattcgttcacttctcagctatccaaactgacggtttcaagaccttagaagaaggccaaaaagttacctttgatgaagaatcaagcgatcgtggcccacaagctgctaacgttgttcctcaataagcttagcttttaaaagggctgcccgtgtggcggctctttttttatgcgcaaaatagcgggtgacttttgacccttatggcccaacttaacggcgaaaactggtaaaatagaattataaactaaacgcacgagtaagcgccaccaatcacgactggttgactagcgccgttgagaggagtcaaatcgatgttaaaattaggaattatcggaacgaattggattacgcaacaatttattgatgctgccgctgcctctggtgaatggcaattgacgagtgtttattcccgccatgctgagaccgcgcaggcttttgccgccaagaatcatgccgatgagacttttacggatttagatgcatttttcagtcggggtagttttgatacggtctacattgcgtcaccaaacagtctgcattttgcccaggctaaacaagcaatcgcctatggtaagcacgtcatcgtcgagaagccagccgtggcgaaccaacaagaatttgaacagttagatgccgttttaaaggctcaccctgatgtcctattatttgaagcagcacgccagattcacgaagttaatttccaacgcgtcaaggatcagattaaaaagttatccttagttcagggtgcgacgttgacttacatgaaatactcgtcacggtatgacgccgtcttggctggtgaagaaccgaatatcttctcgttgaactttgccggtggggcgcttcaggatttaggcgtgtacctggcctacgatgcggtcggctggttcggcatgccggaagaggtggcttactacccaaccttgattcgaacgggcgttgacggtaagggtgtggctattttacgctacgctgactttacggtgaccttgaacgttggtaagactagtaattcgttcttgccatctgaaatcaacggtctgcgcgacgctattgtgatggacaatcctgctgaacttggacaaatcacttatcaagataaggatggtcaggagcatgcgattggggcgcaacccgataccaatccaatgctggccgaggcgcgcgacttcgcaaccgttatcaatgacccaagtaatcaccagacggaatacttagcttggcggcaacttagtcgaaatgttaataaactattatttaatttgcggcagtcagggcacctatattttacgggtgaagcccctgataccgataaatagaaatgaggcactatgttagacgtatttaaaactaaatttgcggcggcggggttcaccgagttgtcgccgattcaaacggcagtggccgagccacttgcagctggtcaatcggtgttaggactcgcaccaacggggtctggtaagaccctagcgtttacgtggccaatgctcgaagcgttgcgggtcggagaaggcacgcaggcactgatcctagcgccatcacaagaactcgcgatgcaaacaaccaacgtggtgcgcgagtggggccaattgatcgatgccaaagtcctcgcgattaccgggggggctaatgttaagcggcagatggaaaagctcaaaaagcatcctgaagtaattgttgggacgccggggcggattactaacctgattgcggatgggaagatcaagcttgggcatctgaagatgatgatcgtcgacgaagccgatgaattactgacagatgaaaccttggatcagattcgtgaaattctcgacgctacatttgctgaaacgttacaattaggcttcttctcagcaaccgaaactaaaattttagatgagttgccacgctggtttggtcagcatgttgaaaaaattgatgtgcgggccattgatcagacccagggggtggttcggcaccggacgatgcaagtgggtaatcggcaccgggtggacttactgaaacggattagtcgtgttgaccatatgcgggccctcgttttcttcaataagatgcaggaactccaacatgtcgccttagaattacgacaccagcacgtgagttacgttgccttgaccagtaatcaacggcaggttgaacgtgaaaaagcgttgcggttattccggcaaggcaaggtcgggctgttgttgaccactgatttggcggctcggggtctagacgtgcccgaattgccagctgtgatcaactatcagttgcctaaagacgtcacgacttatattcaccggagtggtcggacaggccgcatgggtgctgatggactagtcttgacgttcggtgacgaccatgatgtccgcgactttaagaagctgatggcgacgactgactatgaaatcaagccgggttacttggtcgattatcatattgttgatacgaaaccagataaagttgttccaccgttaacgttcgaccatccagaaacggctggcaacgcggctaacggtcggcaccgggtcgtgagtgctggtcacccagatgaggttaagcgagtggagacgagccggaagcggcccgctgcggcaacacctaaaaagaagaaaggtcacaataagcattctaagaaaaaagggatgcgcaagaaaaatcgtgatcgctttagcaatcagtaattgccaaaatgcacaatccgtgagatgatattttacggattgttaatggcctcatagcacaactggatagggcacctgcctcctaagcggttgatcccggttcgagtccgggtggggtcagttgaatattagaaagcaccgtttcagggcagcgttttagtgacgttaccttgaaacggtgctttgggtttaagtagccacgaatgatatgaaatcgaaatgaatactgtattagtctaaacgcccgctaccagtccaaatgactagtagcgggcgttgcgattaacgaatgacgatgacgttgcaaggggcgtgatccacgacgtagctggtcgttgaaccaacggctacgcgatggggcgagttggtaccagtggcgccgagcacgatcaagtcaatttcgggatgttgcttggcatagtcctcaatggtgtgttttggaatcccgtagctgatttcagtttttaaattcggtgcggacgtggtggcgacgaattgttgtcgctgccgcatggcatcctttgcgtgagcggcttccgcgtctagtaattcagatagaaccgggtcgagtgcgggggtgtggtaggcgctgtcatccaccacgtagagcgcagtcaggtttgcttggtgccgctgggcaatgttgaccgcttcagtaaaagcggcttgtgcagcatcggaactgtcaacaggtactaaaatatttgtgtaacggcttggcattataaccacctccagttatctttacgataattataatggattagtgttgggcaataaaattaaacgcacctagtgggcaaggtcgatgaactagcgtatattatagacagtaaatttcttttgggggttaggtatgttaaagcatgtacagaacggcctattgacctttgaacgggtcgttgagcggcaacgttattggcgcgccttacgtgatacgttgacgctgctttttccattcgcattagttggggcgtacgttagttttatgaaccaggcaatctttcagcgcaatggttttttgaatcatatttattatctcagtcactggctgccggggtttaaacatttggcaacttacacgacgatgcttaatctgagtatcaacggcatccttgccgtgattgcggctttttcagccgctaattttgtcgcgcggagtgcccagcgtgataatctgttagcgggattgacggcggcaattagttttatcatgcttaatatcaattataatttttttagtacccagggtcagcctgctggcagtcggtttttagaagataatttgggaactcagggcatcttcctcgcactattggtgggcctgttgactggttggttgttcagtcatttgacacggtatccacacatccaccaggagatcgagacccagacccacttgctagcgcgggcacacgcgaactggttaccgatagtcgctgctttgctggtgttcagtgccatcgggtatggtattagttttgtcagtaaagggggattaaacggcctgttttacgcggtcttcaccttaccattcagtaatccgggggcgtcgctactagcgataattggcgtggcatcactcagcaatttatactggttaattgggattatcggtccggttgactttagtggtaacagtactacgagtacggttcaaaatttggaatatgcgttgcaacacggttcggcgtggggcgcgccaaatccagtaacgctccatacgttatttgatgcgtttgcgaacgtaggtggtcccggaatgacgttagcgttattgattgcaattttgtggcgttcacgtaaccgtaattatcgaacggtggccaagaccagtgccttgccagtactgtttaatatcaaccaaccgttgctcgtcggcttaccgattgcttatagtccgattttagcgattccgtttttgttagcgccactggctagtatggtcatcacgtggtgcgcgttgaagcttcaatggatgccgccggtcgtttatccggttggtagaacgatgccgggcttcttgaccggttggctgggaactggtggcgactggcgggctttcatcgttagtctgatcaatatagcggtggccacagcaatctacttgccatttgtcttactggcaaaccaggttgagggggaggcgaaggcggatgcttaaacgatattggtggcggtggctcctcggaatcggtttgttaatcgggatttgttggccggcctacacgtggagtcaagcgaatatcaagacgctgaaaaacactggtcggacgcggatggcaccagttattatggtccccggatcgagtgcgtcacaaaaccggtttgatagtttgattaccgagttggggaaggaaacgccgaaaaaacacagtgtattgaagctgacagttcagacggatgggacaattaagtatagtggttcgattgctgctaatgataatgagccgttcatcgtgattggcttcgcgaataatcgtgatggtaaagctaatattgataagcaagctgtctggttgaatacagcattcaaggcgctggtcaaaacgtatcactttaatcacttctatgcgctaggtcattccaatggtggcctcatttggaccctctttttagagcgctatctaaaggaaagcccgaaggttcatattgaccggttaatgacgattgcctcgccgtacaatatggaatcgacaagtacgaccgccaagacgagcatgttcaaggaactttaccgttatcggactggtttgccggaatcgttaaccgtttactcgattgcggggacggaaaactataccagtgatgggacggtgccgtataacagcgttaactacggtaagtacatctttcaagatcaggtcaagcattttacggagattactgtaacgggggcgaatacggcgcactccgatctaccacagaataagcaaatcgtcagcctgattcgacagtatttattggctgaaacgatgcctgacaaggttcgtcaaaaaaacgcacaacgggtacaaaattagttacgttgtgtggcagtgctactgctgttaagacaacactggtgaacgatctggttaagaaagttatacatgcagtgaatagaacaacaaaaacgattagcgtctcgtaaccgggacgctaatcgttttttagttagatttgcaataaattaatgatgatgcctggcgttgtgtgagcgggctgaccgtttcgaatagtggtgcttcgacggcttcgcccggtgcttgactcgcattgtgacacgggttccccgaactcgcaaggcttgtgcattggttgccggcagagtcagtaaaccgccacagacggccaggatgacgagcactggtaatcctcggtggatcgacatgatagaacgcccccttaactaaaatccttatttagtgtataagtaattcgagtcagcgtcaacctaaggtccgttactgactttacaaaacgttaacggcatattaacggattattcacaaaaagccggcaaatttgattgtattttgccaagttttcctttatggtgggagtaatatataaaaggaagtttggctaaatgaatattgaaatcttaaactcagcaatccaagacttacatttccaaatcgtttatgatcgttctgaagacgatgacaatcctggtcagggtcaattcagctatacgaccgccaatccagatgttaagaagacgtttggcgatgacgttgtgcaggcccaattacaagtgacctataaagaagaaatgttcgacttatccgcgaccgtttttgcgattgtacgcctaagtggtgagatggtgggaattattgaacgtcaatctgacaacaaatcaattgaagacgacgaacaagaaatgttgaacaatttgaatggtgccatcattccagcgttgtctgccaaagtccgggcctatgcagcattattgtcaactgaagctagcaactttgccatcatgccagctgactttgatgatagccagcccaatgatgctgaataagcgtaatccaagagcttgtcaaactggcaagctttttttgatggcttaaggaatgagttctagcgttgtgtaaccgttaacaaaggtgctataataatgatggtcagagttgactaggcaactgcggttgcaatgacgaggtcagaaggtctgattggtgacttcagcaattattactttgatccaggcttatcggaatggttcaaagcgggggtgaccgcgagtcggtcagcacacataggggcagtgaatattgacacatagtttgagccaagctggtaagtattgtggtggccaagttacgctgtaatttggccgctatttttatcttgttttcagccgaacactgcgacaaaaaatgaaaactgtcgtgatgaaatcactgtaaattgtcacatgaaagcgtatactgacggtgagaggggtgagcgttatgtttaaaccaatggcatctgtttttacgaaccatcaaattgcgggtcattatcgggccattgagcgggcgcaaaagtgcgtggtcccatttcattttgagattcagggacaggagtatccaaagccaaaaccagaacgtaactggttacggcgcttatcggggacgtcgagcgaaaagtacgcaatggtcgaactgaccccgacaaaggtcgttttgtggtcaccagaaggacgcaatctgggtgaaatgccattgagtgcggtgcggcgaattcagatcggtgcgattcggtgtcacgtaacggaaggactcgacccacgccacgcatttcgggcgacgatctttgtgctgactgatagcggtaattattattttgctaattctgatatggaagttttaccggcgatttgtaagttcgcccatgaacatcaagtgccggtagaagacccactgcggttgattccgcttttgaaggtcggctggcgggtcgcggccgtgacgttacatgaaacctatgcgcaactggttgcgcacacgggttatccggctgataaggtttaacttaattttatgattaataataatgaaaaacggactgtcgataatgacgtataacatactgatttttagggtaacaggggattaatcagtttattgcctcacgatggcttgtttttggaatggaccaggtttagatgactcttcggcagcatgggcaagttttatgccaagtcgaaagaaagttactttaaaaaaagtcttcaccggtacgacggttgacattcagcaaaaaatggcagtataaagcaatcaatagaatgagagcggctattaagtagcagaacaaaaaaacagcggttcactgccagattaggactgtgaaccgttgcttttaagcgtcataattaaggttgttctgtttcattgagaccgactgattcatcatcaaccgtgttttcggctgcgtggcggttgaagagtaagttaaggccaactgcggctacactaccaacgaccaccccgttgctcaacatgatttgaagtgcaccaggtaagaattggaagatattggtttgcaccgtgacgcccaaaccaagaccaatcgaaacggctgccacgagtaaattattgttattgcggaaatcgacttgagctaacattcgaatcccttgaatgccaacgatcccgaacatgacgaccatggcgccaccaagtactgggtcggggataatcgtcgctagcgcaccaatcttaggcagtaggcccaatacaactaagaacgcagcggaaaagtaaattggctttcgcgtcttgacaccagataattgaacgacgccgacattttcagaaaatgttgaataggggaaggtactgaacaagccaccgaggatgacggcaattccttctgcccggtaaccacgttttaaatcgtcgccttcaattttacgaccggtaatgtcgccaagggcaaagaagaccccggtcgattcaaccatcgttgttaaggagacgaggatcatggtcaaaatggatgaccattcaaagtgcggggtcccaaagtaaaagagggtcggtaaatggaaccagctagcttcagcgacgggttttaaagaaaccatccccattgccccggcaatcaaagtcccaactaaaataccaatcagaatcgaaacggatttcatgaagccacgtgcaaacacgctaattaataaaataattgcgatggtgagaaaaccaatgccaagtgcttgcaagttaccgaaatccttggcactggtgtcgccgccaccaagattttggaaggcgaccggaatcagcgtgaatccaataattgtgattagcgatcccgtaacgactggtggaaagaggttcttgatctttgaaaataagccggcaatcagaaaaataaaaataccagcaccaatgattgagccatacatggtccccagcccatatgttttaccgatttgaatcaacggattgacggcttgaacggcacagccaagcacgacgggaagcccgattcctgttagtggtgtacgttttaattgtaggaacgttgcgatcccacacatgaaaatgtcgattgagactaggtaagttaattgttcttggctgaaatgcaaggccgcgccaatcaataatggcacgagcacatcacccgaatacatagctaacagatgttgaaaccctaaaatggccgccttaacattggtaattttaggtgctgcggatacttccttcaaatcaatcttcctctctcgattaagctgatttgcctataaaaaaagtcaccccggcaaacgggatgacctcgtttgcttatagtccaacctttacggggttgggtagaaactcgtcaaccatatcatgacattatataggcaattaccacttatttgaatgagacttattctagcacagatgaaaaccgaatacaaatgtagccgaataaattaatgttcgtgaaaacgatatttttttggaagatgaaaatgaaaacgttcacttttgtgattgttgattatgccaaagtagcactgccatttctagtgtttgggtctgttcaggatcgtccaagttcaacgttagcattttttcgatctttttaaggcggtaaatcaccgtattgcggtgaatatctaggtggccggccacttcggcaatgttttgatggtaataaaaatagccatacagggtcgtgagtagattaagttgttcattcgcactgacaccactgacgagtccacctaaaacccgttcgacaaacgatcgcgcttcattttgtggaatcagtgaaattagttccttgacgtacttgggccgatagatcgtgactgcgtgggtactgtttttgctgagtgccaaggcttctgccgcttcattataggttgttgcgagttcggttagtggtagagtcgaataactgtaaccagcaatcaaacgcgcctgtctgtccaactttggctgaataaattgaacgagggcggtcagaaagtgctgggcattttgctggtcattgattaataagaccaattgctgctttaatgaaaaaacaatgacggatgcttggtattctttaataaaccacagtgtcagttgctgaacctgttccaagagatggttacttaagagggcctggtgattagtcgtgactaaaatggtggcgcagtggaacttcgtactcggatcaatattgcgggctttcagagtcttattcacgaggtcgtttgaaataccgccatccattacgtttaagtagaaaccactttggttgcggaatgcggattcgtttaacatgtccacccgaccattgacgaaactcaaggtgtttaagacgacttgcgtcagcatctgatcagttgagttggccgggtccaagtcgacgacgcctacaaaggccttattttccttataagccgaaaatagtggcatgatggtcaggtcatttgcttggtaagggagaatgacgcgggtattgaggttgaaatagtcgatatcggtttgattgcgtaaaaaatcagtcaaggtattgcgggtcatcggtaaatcttgggaagcactgaccacccgaaaatgactatccattaagaagagaggatgatgaattagctcgctacatttattcaagaccgtggtgttggttgggtctttgagcaacaaatccgctagtgtttggtttgccttgacgatgcgactgagctcattagtttgtgactttaagatgatgctcagcattttgcgcatggtttcagaaatcaactcatcaccgggcgtaataatgattggaaaagcgagttcgttcgctaattcaatcactttttttggtaaatggtcaacgtaacgatgatccttaaatccgagaccagcacagttggcattgtgcatcgccttgatcaaagttagtgggtcggtggttgtattgacgaagggatagccgttcgtaatcaaaaactgaccattagcaaggtagtcagcaatgtcaggtgactcgatcattccgatattactaatttcgcgtttgagaccgcgttcacccgcaattacccgcatatgttgcattgatggtgtttgtaatagtgtttgtaaacgcatggtaagtccccctacaattagttatctttaacaagtagtataccgataatttggcagtttgactataattaaatgaaaaatagattaaaaacaaatgaagcgtcgaaccagtgttatgggttaaggaatttaagtattggaaaggtttatcctcatttaagcgcaggagtagccggcgcaggactgctgaagaaagttttgtttagtgtaaattcacctggttagggcgttggatgccgacatacagaaacgggattcgctcgggttgagacttccagttagctaagtgaaagttcaccccctcaacgttgccgttgagataatcttcagtttcaacccgtctgaacttcaccggcttccagtgctgagtattgtcagcaacgcctttcagtcgaggtggtgttcaagtgatgggtggacttaacttttgctgagtttgttgttgctcataaagggtagatttcgcatataatgatattttgatagaccatttgttgctaaattagcacgttaagattgaaacagtcattaaagtgaattgatggtctcccagctttaattgaagttctaatatcaacggattcaacgaccaatggtactaatattaggcgaccgctcatcatttattcttagaggccggaataagacgatcacgtgtcacgattggaaatctattgaactcgccaggttcctcaatgatgcttgtcaacataaagggcaaatgaccaaagtcgtcagataattaacgcgacttaagttgattagtccttgacagttgtggtggagttcgttacacttagtccaattaaacaagcacctttaacttagtcctgtgaggctaacaaggggaacggtcatgtagggtctcccacgcttttcgcaggaaaacagggtgactctttttttaccccgtggattaaggtgaaattacagaaatggagctgacaaactaatggcacgagaagtcgttgatgcaatgaccatgcgccgcgcgctgacgcggatcacttatgagattattgagcagaataagggtgttggtaacctggtatttatcggtatcaagactcgtgggatttttttggcccaacggttagcgcaacgattgaaacagttggaaggcgttgacgtgccagttggttcgttagatatcacgttatatcgggatgatcatcatgcggttgatgttgccggtcaagcgaagctaaatggtgctgatattccggttgatatcaatggcaaacacgttatcttggtcgatgatgtcttatttacaggccggacagttcgggctgcgctagatgccttgatggaccatggacgtcccgcaaagatttcgttagcggtcttagtcgatcgtggacatcgtgaattaccgatccggcctgattttattggtaaaaatattccaacggccttggatgaacaagtcagtgtcgcccttgaagaacacgacggacatgatggaattagtattgaaaaattagaagaatgatttaattgaataaaaccatttaattgtttccagagaggaacgaaacggtttggtcatgcgtgaccacttaatcggagtctagcctctttgcaaacatttttgcggaagctagactttttttatatacaaaggagacggcaatagccatgaaaacgagtcaaaacctagttagtgttgaacaatttagtaatcaggacgtgatggcctacttgaagttggcccaagctttcaagaatgggaaaacggtacaactgtcacagccaacgtttgcgatgaacttattttttgagaatagcacccgcacacatacaagttttgagatggccgaacgacgattaggattacaggtgattccgtttgacccaaagactagttccgtgactaagggcgaaagcttgctggatactttgaaaacgattgaagccattggcgtcaacttggcagtggttcggcatccacgcgatcgttattatcaaccacttctcgacgccgggtttgacatgagtttgatcaatgctggtgatggtagtgggcaacatccgtcacaatcgttgttggatatgctaactatttatgaagaatttggtcattttgatggtttaaagatagctattgtgggtgacttggcccattcacgtgtggcccgttccaatatggcgttactgacgcaactaggagcccaggtttactttggcggccccaaagaatggtatggccgtgactttgaagcatacggcgaatatcagacgatggaccagttagtcgcaacgatggacgtcatgatgttattacgtgtccaacacgaacgattatcgcaagtgaacaatcagaccttcgatgcgtctgcctaccatcaacagtatggtttaacagctgagcgcgccgcacgaatgcccaagcatgcgattatcatgcatccggcccccgttaatcgaggtgttgagctagcgagtgacttagttgaagcgccgcaatcacgaatttttcagcagatgacgaatggtgtttatattcggatggcaatggtggcgagcgtcctcgctcatcaaggattaatttcagcaactcaagtggaggtttaacgcatgacaacattaattaagaatgctcaagtgtggcaagcagggcagttacaaacaacggatatcctgattgccgagggccgaattaaggcgatcgggcatcaactgcacgatcagtttggaccggcggatcacgtcatttgtgccgatcagcactttgttagtccgggctttgtcgacgtacacgtccatttacgcgatcctggtcaaacagcgaaggaaacgattgcgaccggaacgttagccgcggcgcatggcggtttcacaacggtcggagcaatgcctaatgtggatccggtacccgatacacctgagcgggtcgcgacgatggtggcgcgtaatcagcaggaagcacatgttcacgtcgcacaatatgccagcattacgactgggcggactagtgaacagctcgttgactttgccggcatcaaagctgagggggcctttgccgttagtaacgatggttccggtgttcaaacggccggaaccatgtttgcagccatgcaaggtgctgctaaagttgggttgccattagcggcacacgttgaggatgattcgctttatcatcatggcgtgatgaacgcggggcccgttgctgatcggctaggattgcctggtatcaataatgtttcagaagcggcccaagtggctcgtgatgtcatgttggcggaagcgagtggggttcactaccatgtttgtcacgtctcaacagcggaaagtttacgcgtgattcgcaatgcgaaagcagctggcatcaacgtgacttgtgaagtatcgccccatcatttactcctttgtgatgaagatattacgatggataacccgatgttaaagatgaatccaccgttgcgttcagccaaggatcgcgcagcgttagttgcgggattgttggatggcacgatcgacatgattgcgacggaccatgcgccgcatactgatgccgaaaaacagggcagcatgaagacggcagccttcgggattactgggattgagactgcctttgccacgctatatacggcgctggtcaagacccggttactgacgctcggtcgtttaattgaactgatgagcacgcgtccggctgaactatttggcttaaatacagccggccggttggtagtgggggcaccggctgatctaaccattattgatttagatcatcaatatgaaatcgaagcggccaccatgttatcgaaggggcacaattccccgtttatcggttggcccgtttatggcaacgtcttaatgacactagttgacggtaagttggcatatggaaaggaaacgcaagcatgaaacgatacttagtacttgaagatggtacgatttaccccggcacggggtttggtgcgacaacggccacggttggtgaattagtctttaataccggcatgagtggttatcaagagtcgatcacagaccagtcttataatggcgaaatcttgatgtttacgtatcctttgattggaaattacggcattaatcgggatgaccatgagtcaatcaagccaacttgtaagggcgttgttgttcacgaagttgcccgacgagccagtaattggcgtaatgctcagtcgttggacgattatctaaaacagaatgcgattcctggcattatggatattgatacgcgggcggtcactaaacatatccgaacgaagggcgcgatgaaggccaccatcgtcgataacgtcttaccagatacggttgaccggctcaaagtcacggaattaaatcgggccgttgttgcccagagctcaacgaataacgcctatcccaacccagcgacaggccccaacgtggtcgtcgtcgactttgggttgaagcattcgattttacgcgaattagcaaagcgtcaatgtaacttgacggtgttgccgtacaataccacggcgagtgaaatcatggctttgaatccggatggtgtgatgttgacgaacggccctggtgatcccaaagatgttccgggagccttagagatgatcagagaagtggaaaaacatgtgccgctatttggaatttgtctcggacatcaactttttgcgctagcaaacggtgcggacacgttcaagatgaagttcggacatcgtgggtttaaccatcccgttcgtgagattgcaactgggcggattgattttacgtcgcaaaaccatggttacgcggtggatcgggattcattagcgcagactgacttgttaatcacccatgaggagattaatgatggtaccgtggaaggcttgcggcatcgcgactacgcggccttttccgtgcaatatcatccggacgcagcgccgggtcctcacgatgctgatcatatttttgacgaatttattgatttgatggcggctaatcaatcaacccagaaaggaagccaattcaatgcctaaacggacagatattcataaaattatggtaattggttcaggaccaattattattggtcaggccgcagaatttgattattctgggacacaagcttgcctggcattaaaagaactcgattatgaagtggtcttggtcaattctaaccccgcaacgattatgacggacaaagaaattgcggaccaggtctacttggaaccaattacacttgaatttgtttcacagattctccgcaaagaacatccggatgcgattttgccaactttaggcggccagcagggcttgaatatggcgatggaattatctaaatcgggtattctcgatgagttgcacattgaactgttaggaacgaagctcagcgcaattgatcaggcggaagaccgggaacagtttaaggcactgatggaagaattgggcgaacccgtgccagcttctggtattgcgcggacggttgacgaagcgttggctttcgctgagcaagctggttatccggtcatcgtgcgaccagcctttacgatgggggggactggcggtggcatcgccgagacgccccaacagttacacgacattaccgaaaatgggttggcgttatcaccagtgacccaagttctgatcgaacaaagtattgccgggtacaaagaaattgagtttgaagttatgcgtgatgctgcggataatgcgatggtcgtctgcaatatggaaaattttgaccccgtggggattcataccggtgattcaatcgtctatgcacctgttcaaacgttagcagatcgcgaagtgcaattattacgggatgctgctttgaagattattcgggcgttgaagattgaggggggctgtaacgttcagttggccctcgatccgaatagttttaattactatattattgaagtaaatccgcgggtcagtcgctcatcagcgttagcctccaaagcgactggttacccaattgctaagatggctgccaagattgcagtcggcttacatttggatgaaattaaaaatccggtgacgggaaccacttacgctgaattcgagccagcgttggactacgtggtttgcaagattcctcgctggccgtttgataagttcacccatgctgatcgtcgtttgggcactcagatgaaggcgaccggcgaagtcatggcgattgggcgcaatattgaagaagccacactaaaggcggtccgatcactagaaattggggtgcaccacgttgaagaacccgctttgcgtagtgttgacgatgatgtactcagcgataagctcattcatgcgcaggatgatcggttattctacttaacggaagcaattcgccgcggttacccgattgatgaattagccgaactcaccaagatcaacgtgttcttcctggataaactattacacattattgaaatcgaacaagccttgcgtacccatacggatgacatagagacactaactgtcgctaaacgcaatggcttcgccgatcaaacggtagctgactattggcacgaaacaatcgatcaggttcgcgacttccgcttagcgcacaaactagcgcccgtttataagatggtcgatacttgtgccggtgagtttgcttcggagacaccttattactacggcacttatgagtttgaaaatgagagtattgtcacgaaatgcccatccgttttagtgttagggtcagggccgattcgcattgggcaaggggtggaattcgactatgctaccgttcactccgttaaagccatccaaaaagctggctatgaagcgattatcatgaatagtaatccggaaaccgtctcgactgatttctcagtatcagacaaattgtacttcgagccactgacgattgaagatgtcttaaacgtgatcgaacttgaaaaaccagtgggcgtgattgtgcaatttggtggtcaaacagcgattaacttagcgaaaccattggctgaccatggtatcaaaatcttagggacgagtgtggcggatgtcaaccgcgcggaagaccgtgacgaatttgataaggtcatcaaagctttagctattccacaaccggctggtgatacggcaagtgatgaagcaaccgcgctagctattgcggataagttgggctatcccgtccttgtccggcccagttatgtccttggtggccgggcgatggaaattgtcaagaagcggaccgacttagactattacatgcataacgcggtcaaggtgtcgcacgaccaccccgttttagtggacagttatttggtcgggaaggaatgtgaagttgatgccatttgtgacggtcaaacagtcttgattccgggaattatggaacacatcgaacgggcgggtgtccattctggcgattcgatggccgtttatccgccacagtcactttcggcggcggtccaagcacaaattgtggattatactgaaaaattagccattgcgctcaactgtgtcgggatgatgaacattcaattcgtaatccacgacgaccaagtttatgtgattgaagtcaatccgcgcgcgagccggacggtgccattcttaagcaaggtcacgaacattccgatggctcaagttgcgactcgggcaatccttggccagtcattggctgaacaaggttatcagactggcttggtcacaccgggtcccttagtacacgtcaaagcgccggtcttttcattttcaaagttgaatcgtgtggatagtttgttgggaccagaaatgaagtcaacgggtgaagtcatgggcagcgatgtcacgatggcaaaggcgctttacaaagcctttgaagcggctaagctacacgtgccgagccatggtaacgtacttttgactgtccgggatgaagacaagccagaaacagtggcgttagccaagcggttccatgcgttgggttaccaattgctagcgactcggggaacggcgactgctctgaccacacacgggttacccgttacgaccgtcgacaagatcgatagtggcgagcatgatttactgcatcgcatggaagctggcgaaattcaagtcgtcattaatacggtttcggatgaagaacaggctgaaaatgatggtaccctgattcgaaacacgtcaattatgcacggtattccgttgtttacggccttagatacggtcgcggcaattttgcaagtacgagaatcacaatcatttgtaacgcaggcgctctaaatcaggacacccgccgataagcttgatcataggaggaaaacgatgggacgattaacagtaaatttagccggtgtcacgttcaaaaatccggttatgccggctagtggtacggcggcatatggtcaacagatggctcaacagttagacctgagtgcgctggggggcttggtcatcaagtcgaccaccgccgaaccgaaagcgggcaacccacgaccaacgaccgcggaaacaaccgcggggtggctcaatgcaattggactcaaaaatcccggaattgacaatgtgctggccgataaattaccgtggttagcgactcattatccggatttaccgattattgggagtgtcgcgggggcgagctttgatgaatacgtggcagtcgcacgaaaaatggcgtcggcacctaacgtcaaattattggaaatcaatatttcatgtccaaacgtcgaccatggcggcctagcatttggaactgatccagcgacggtaacggcgttgactaaggcgattgttgccgcggtcgataaaccagttttcatgaagctgaccccgaatgttactgatattgtcccaattgcactcgctgccgaagctggtggagcggctggactgacgatgattaacacgttaacgggtatgggcatcgatttagccacacgtcaaccgatcttagcgcatggtacgggcggtttatctggaaaagccattcatccacttgctgttcggatgatccatgacgtgcgtcaacataccaagttgccgattattggcgttggtggcgtgttcacgccggctgatgtgttggaattttacctggctggtgcaaatgctgttcaagttggggccgcaacgtatggtcacccgactgcttgtacagacattattgctggattaccggcggcgatggatcagtacgggatcaccagcttgcaagcgttgattcaggaggtccaaggatgaagcgaccaattatcattgcgttagattttcccaccgccgaacgggccttagcttttttagaccaatttccggctgatttacatgtcactgtcaaaatcggcatggagttattttatgcagcgggaccgagtattgtgacggacgtgcaagctcgcggccatgcggttttcttagatttgaaactacatgatattcccaataccgtcgaatccgcaatgcgggtgatcgggcggttaggggtaacctatacaacggttcatgctgcgggtgggcacgtgatgctttcagccgccaaacgaggattggtcgcgggtgcaatggccgctggagtcactgcccccaagttattagcgattacgcagttaacttcgactaatcaagctattttgaatcaggaccagcaaatcatgggaacgattcgggcgagtgtcgtgcattatgccaaactagcacgggcgagtgactgtgatggcgtcatttgttccgcccaagaagttcaggcgattcatacggccgtcggtgccgattttctcggaattacgccgggaattcggccagcgtcggcgcagtcagatgaccagcaacgggtgatgacaccggctgccgctgctaaggctgggagcaacggtctcgtcatcgggcggccaattacgcaggctgcagaaccagttcaagcttaccgagacattatgacagaatggagtaactaatatgagtgaaattgcagcaactatcgccactgatttgttgacgattaaagccgttacactacgaccaaacgacccgttcacctgggccagtggcattaaaagtccaatttatacggacaatcggctgacgatttcttatccggcggtccgtcagcatatcgcgcacggaatcgccgccatcatcaagcgtgaatacccggcgaccgaagtgattgcgggggtcgcaacggctggcattccccatgcagcctgggtggcggaattgttaaatctaccattgatctacgttcgtgctaaacccaaggatcacggtgctggacgccaaatcgaaggggtgttaaagctcggtcaaaaagttgtcatgctggatgatctgatttcgacgggtggcagtgtgttacaggcggccaaggccgttcaagcagcaggtggcgatattcaggctgttggggcaatcttcagttatgccttggatgcggcaacgcaaaattttgccgttgtgtcattaccgctgttcagtttgtccaactatcctgaactaatcaaagttgctcgccaagcagattacattgatgacgaggaattagcttcgctgcatacgtggcgtcaggacccagaacactggggagtgactgattaggattacgcgccataaatggctggcatatttaaaatagtcatgaaaattaagctggattatccagatgattttcatgactattttagttaccggctcgtgctaatattaacctgtgacagattgttaagacaagataaagaaatgagggaatattcgatgttagcaattttagttggcttagcaatcgggattgggttaccaatgcaaacgagtattaattcgcgattgcgcaattcagtgggatctccatttggtgcctccctaatatcttttgctgtggggacgttgtttttggcgataatgacactaattgatgtccatactttaggattttcgacgacgttatttacgagtcaaccggtttggatttggctgggtgggctgttgggggtcgtctacttaactggcaatatcttgttgtttccgaagctgggtagtgttcaaaccgttattatgcccgtgcttggtcaaattttggccgggctattgattgataattttggttggttcgactcaccccaaagtacattgacgatgacccgatttttgggtgcaattttagtcttggcgggagtcatcatcaccgttgcggctcaggggtggctcgaacagcggcataatcgaatcactgaaacagcggaaaaagatacagctactgacactgacactgaccaaagtggccttggaatttggcgtgcactaggtgtggttgccggaatgctcagtgcgatgcaaactgcggtcaatgggcacctaggtcgggtgcttggctccacagtgcacgcggcatttgtttcttttttagttggtactctggggctgatcgtcatcgtgttagtcttgcgacctcaattcaaattgattaggccaactaagacgcctaatccttggtggatgtggattggtggcatgattggcgcgctgtatgttttgggtaatgtttacttggttccggtcgttggcactggtttagcggtcgtcattgttttagtcggactgatggccggtagtttaatgattgaccaatttggctggtttgcttcaaaaaagaacccaatttcgggggtccagttgatgggcttgctcgtcatgattgtgggggttgtgctaattcgcgtcttttaagcactctgaggattggcgagtgtcaccgggtgatcggtaaggtgttttgaggtcgagacttgcagccggatgaataagcgaccgtgcgagttgaccacattaagccgtgaccacgttcgttaaagcttctaaaatttcaaatcaggatgacaaaacggtactggatgccgggcacgataagccattataaatccgacgcacatctggcagcagtggccgtcaacgttgagaattaagacgtgcagcacacgggtcgcctggctgaataacgtggtatttaatggacgcgataataaacatctaacttacgggttaggtgtttttttagccggttaaatatgcgataatgagactaacttaatgagaacgtttgttcagttcagaggaggaattagtggtgagcttacaatttgtattgggaccagccaagatggaccatcgccgtaccatggtggcgcagttagtggcaaccttgatggctaagccacaagatcagtttttttatttggtaccgaaccatattaagttcgatactgaagttgacgtgttgaaccgcttggcacaggcatttgggcaaccagatttgtatgcccagactcaggttcaggtcttttcatttacccgtcttgcttggtacttgatgaagaacgaagcagcttatcaagtaccacgactctccgctgctgggattgacatgctattatatcgcattctacaacgacatgccgatgagctgcgattgtttggtggtgaaatctcgcaaacgggttttgtgactcaactagctcgtgaaattaatgagttacagaccgctaatttgcaaccagaagatgtggttcaattggcagcgaatgctcaggcgggtgacttgcaggctaagctacatgatctggcgatcgtttacaaagacttcgtggcggcgactgcagataagtatcttaagcccgctgatattctcgttcaattgaatgcttacttacggcgtcaagacttgcacggaacgcacgtttatgtggaactcgctggctttgcccaattaccggcccaggaacagggaatcgtcacgactatgctggaacagggcgcggacgtgacaatcagtttgatgctcgatcacaaagtcgttgaccgggcgccagaaaatggcacgctgttttatcaatctggtcggctttattatcggctttatcagtatgcccgtattcgtcagattccggttagccaagatatttatgctgaaacgccgcgcgtggctcccggcttagtggctctcgatgatttttggcgtggtcagccccaagcggctaccggttacgaggagccgaatacgaatgtgcatttattccggaccgatagtcgacagaccgaattggcacaagttggccgcatgattcgggcaatggtcgcgaaaaaacatgccgatcccgccgacgattatcattatcgggacttcttgatcatgacacggcacttagatgcctaccaaacgatgttagcgccgacttttcatgaattagaaataccatactttgttgatttacagcgttcaatggccgaccatccgttagttgagttgattaacgcgttgtttgatatcgacgcacagcagtatcaatatcgtgatgttatgcgagtgttgaaaaccgagctgttgatgccaaatatcaatgggcaaccgatggatcggcaagcctaccgccaagcagtagatctgaccgaaaactttatccttaaaagtggttatcacggccagcggtgggtacaaagggaagattggcaatactttcaattaaccgagggtgatgccggggtcgagacggaccaaaatgctgaaatttcgcgacaaatcaacttgattcatcactttgttgctgaaacgttaccaccgttttttaaaaaaatgcggcaagcaccggatggcaaagcggccgtgacattgctggtcaactttttgacaagccagggcgttacggaccagctattagcttggcgtgatcaagccttggatcgccaagatgtccgggcagctgccgagcctgagcagacctggcaaactttctgtgggatgctagatgaatacgtgacgattttaggtgcagagccatttgaaattacggactttttggcactattacaagcgggctttgaaggtgctagttactcgcaaattccgtcgacgttggaccaggtgttaatttcagagagcggaatggttcaaagtcaggaccataaagttgtcttcatggttggggcaaccgatttagtgatgcctgaccggattatgacgaacaacttattgagtgatgtggataaagaaaatttgcaaccaacgctcagttcgttagatggtgaccactatttaaatgattcagctgtcgttcagctcggtgatgaaagttgtctgaattatttggcctttttaagtgcccgtcgacacttgtttttcagcgccccgttaaaagatgatcaagaaacagatttaaattggtccaactatgtgcggcgaattcaacgccagttcaatttgcgagaacatacttatcttgggacgcctgatccgactaatgccgatgcgcggccatttgttgggactaagcgccggacgattagtcatgtgattcaggtttaccgcgatgtgttaacgacgaatactgaccgtaatcgtgttggcgcaccattacaacctgctccggtgtgggtgtggttacggcaacaattgacgcgtgacccccaattcggtgagctagcacgtcaattgatggctggattaagctatcgcaatcaacctgtcaagctgacaccagccagcgttgaggctttgtatgggcatcaaatttatacgtcaatttcaaaactagaagaattttatcgtaatcagtacgcttatttcttgaaatatgggctcaaactgcgtgagcgtgatgtgttcgagttatcagctgctagtactggggagtttttccacgctgtcttagatgggctcatcaaggcgttacggtctgatcaaatcccattggcccaagccagtgatcagcagttaggacagtatttagagactgtgacccgtcaaatcttagatcaaccacagtttacaattttgacgagttctaaccggatggcttacttgcaacggcagttaatcaacacagtccggcagattgcatttgcgattcgcaatcaaagtaaactgtcagccgctgaaccgaagcaaaccgaggtcttatttggtaacgttggcaaggaacacggattaaaagcgctcgattttcaaattgatgcaacgcatagtgtgcacgtgcgggggaagattgaccgtctcgaccaaattcaagtggcagatcaaagttacctgggaatcgtcgattataagtcatcccaacataaatttgattttcaagaggcttactatggtctcgcaatgcaaatgttaacttatttggacgctgtgctgcataacgagcaagctttagtcggttctgatcaagctgcggttaaattagctggcgcactttacatgcacattcaaaatccaactctgaaaccaaaagatattcagggcggttttgaagcagcactcctaaagaagaacaagtataagggaattttgctcgatgatccgcagttattggaacatttagatagcgaactacaacaaggtaacgggacctcgaaagtttacccattcgcacgtaaaaaggacggggcgtatagtggggggcgtgcagcttcactggtgacgaatgaccagttggaacgattattacagcataatagtcaattgattattgcagctgctgaagcgattttcgctggagaaattcaactaaatccaattcggctgaacgataagacaactgctttacagtattcgccgtatctatcaattatgcagtttgatgcaatgttggcagaaaatgcttatcgggatctaccgccattatcagccaaacaggttcttgatttactgaagacacagaaaggtggagaaaaccatgagtgagggtacaaactatacacctagccagcaagctgttatcgcacagcagggaaataacttgttagtttcagcttcggctggttctggaaagacgaccgtattgatcgaacgtattatgcgcaagatattggccggcacgaatattgaccagttactcgtggtgacgtttacaaacttagctgccaagcatatgaaacaaaagctggaatcgcaaatcaataagcgaatatcacagttaatgacggacaatccggcgcaaaccacggcgtcaccagcgattcggcaattacggcagcaattaaatttgctcggggtagccaacattagtacgttggatgctttttgtctccgcgtgattcagcgttattactacgttattgatttggatcctgtttttcgcctattgacggacaacactgaggggttactcattcgtgatcaggtttgggacagtgttcgtgaacaattatatgatgaagatggtacgttatttgacttattaacagcgaatttttctaatgatcgaagtgatgatggtctcagtcgattgatttttcggttatttgattttgcccagtcgaccccggatccggaaggctggctgagcaagttaccggaaccttatcaggtggatgaggaagcgttaacggccagtgccttttatcaacaacaattattaccattgctcattaatgaagtcgatgggatgcaaatgaaattacgacaggcacaaaaagttgcgacggatgctgacttagtcccgaaaacgcttgaggtactcgctacagcacaaaaaacgctgacgacgctccgtgaacaattggcaacggcaagttggaatgagttacgtactcaagtcgctactttcaagattggagctctcaaaaaaacttataaggacgagccggagaagactgcgcgggccaaaactatgggcacatttgtggacggtgtcaagaaacaaatgaccacccttagcgagacctattttgcggccgatgagcagcaagtcttagatattatggtaggggcaaagtcaattgtgactgagctagtggatgcgaccaagcagtttaagacggcttttgcagctgaaaaacggcggcgacacgtcctggacttttcggatttggaacacctaacgttgcaaatcttaacgagtgacaatgaaagtggtcaggcagctttggcgcagttacgggcccaatttgaagaagttatggttgatgaatatcaagatattaactctttgcaagaaagtattttgcagctgttggcgcgcgaccagccaggaaatatgttcatggtgggagacgtcaaacagtcgatttaccagttccgattagctgatccgttattgtttttgcacaagtatcacgattttgggacgaatcccgaacacggggaacgaatcgtattagctgaaaacttccggtcggtggcgaatgtcgatcatttgactaacctaatctttagtcagctgatggacgcgccggtcgggcaaattgattatgatgaagcggcttacctcaagtatgggcccaaggattatccggccgatatgccacaaacgacgaatctattactttaccagacggaaactgacaagtcgacagaagatgtctccacggatgaaaccaatttttcaattgatgatcctgccgttgggagtatcacgatggtcgcccaaaagattttggcacttaaggcccaagataagccaatctatgaacgtgctaatggggaataccggccgtttcgttacagcgacgtggcgttactagtaccaacacgtaatcataatttaacaattattgatgttttcaaacggtatcacattcccgttgtggtcaatgatgcccagaattattttcaaaccactgagattcgaatcatgatggcactactcagtattatcgataatccatatcaagatattccgttagtggcggttctacgctcgccaattgtcggattagacgaaaatcaattagtttatttgcgtatccagaataaaacgagtgattattttcaagccgtccaggacttttatcatcattatccgactggtccggcgactgaatatggtgatcaagtttatgctaagatcgagaccttcttgacacaattgactgaatttcgagatctggcacgacgtaatcaaatcgtaaccctgatttggcaaatctatgaacgaactggctttttagactacgttggcggcatgccggctggtaaacagcgtcaggctaatctccacgctttatatgaacgtgcttatacgtatgaacagggcagttttaagggcttatttcagttcgttcgttttattcgccggatgcaggaaaaggatcaggacttggcagctgccgtggccgagactgatgcggaagcggtcaacgtaatgacgattcatggtagcaaggggcttgaataccctgtgattttcgtgatggatatggataagcagttcaatcagactgatacgcgctcgagcgcgctattggaccgagaagcggggattgggattacttatttggacccagaaacgcgtgtgaagtacccgaccttgccacaagttgtgactaagcaggtagtcagcaagaagatgcgcgctgaagagatgcggaaactatatgtcgcgatgacgcgagctcaacaacagctctatttggttggaacaatcaaggatattgataccgcgaccgaaaaatggcggcaggcctttgctagcgacgggcgcgttttgagtgctcaggcacgaattgctgcgactaatcaattagattgggtcggtatggccgtgatacggcatccggccatgaaggcatattggggagatgaatggcccaattacgaattgacggatgatccgaccaagctagccgttgaattgggagatgccaccaccgtcctggcggagcaaagtgaagcggtaacggatactcaacctgatgcgcttgaactagttgaacagcaagtcaccatcgatgttgatcaagtaacgcgtgattatctgaccacgttactgaattttcattatccacaccaggcttccacgacgacgacggcatatcaatcggtatcagaagtgaaacgaatctttgaagatccggatactccgctgatgaatgcgaacccgactgttagtcagcggcgttcacgaccgacatcccggtttgtgacagggtcactggagttaccacaatttttacaaactatgcaggcgccaaccagtgcggaagttgggagtgcgacccacttagttttagaacaacttgatttgaccaaaccggtcaatgaaacgacggttcaaagtacgattgatgggttagtggctaaccgggtcttaacgaccaatgtcgcgaaattgattgcagttgacaccatcgtggctttttaccagagtgcgctgggcagtcaaattttggataatccggcgaaggtgcaccgcgaagtgccattctcgttactgattccagcacgtcagattttcgatgttgatgaacatgagacgggaaaagtcctgattcatggaattattgacggctatttagaaacggctgatgggttaaccttgtttgattataagacggaccacgtcaagcggcctgaagaattgaagacgcgctacgctggtcaagttaaactatatgcagcagcgctagcgtcgatgtatccaggaaaggtgactaaacagtatttgtactcactgccacaacaggtgtttgtgccagttaattaagtttggctgtcaggtggtgtttacaaaattggaaaaagcacgtcagaataatctggcgtgctttttgttgagtttggtcttaattaaagcgtttgtcatgtttaaagccaaatgccgcgtggctgacaaatattaggatagtagtaactgataagcattccgttgatcgttgttgtcatgattcatgtagacgataccacggtattcgaagccagctttggtaataatgtgttgcattcgcttgtttaacaagtgcgtatcaattcggagttgacgaaagccgagttggtaactcatggtaatgagattgctaaagtaaaagtcagtcagatgttgtccgtggtaaccattggcaatagcaatacggtgaatcgaggcatagcggtggttctcagtaggcgcccagctgccatcataaataatagcgtaattggggtcaggtgttgttagcagtgcagccgtcccagcaatctgatcatcgacaatgagtacccaggcaattctagcatcaatgtcagcctgaatatcagcagctaacgggtaaccatcttgccattggggaatctgatcggcagccaaggcgtgtttgccctgttcgataatagccatcatggctggtaagtcagcactagtagcttgacgaatatattttgacatgaattatcactactctcgtttagatgctcatattataagccaattttgtaaactggacaaatcaggaacagaatgatacttttttgtcctggtaagctttataatgaaacttaactaaaggacaggagtgacccagatgaaaatctttgtgattggtgcccatgggcagattggtaagaaaatcgtttccaagttagttgcccaaggtgaccaagtgtacgcgggtattcgccaaccagaacaggctgaggctttcgaggatgctggtgcgcagccagtacaattcaatttgatggctcagcctgaagatttagcgttggcttttaatggtatggatgccattgtttttgcagccggatcaggtggtcaaacgggttatgatatgactttaatgattgacttggatggggctgtcaaatcaatggtcgcagccaaaattgccggcgttaaacgctacgtaattattagtgctgaatttacaccggatcggagtcgttggccacgagcattacaaccgtactacgtggcaaagtattatgctgacgaatggttaaaaaacagaacccaattggattacaccattttacaaccaggtacgctgatcaatgatgccggtactggcaaagtaaccgttaaccctgacgttggcggtgagattacgcgtgatgatgtcgcaacttttacagttcaaacgctacacacccctgcaacggtcggtaaaaccattgcgttgatcaatggcgataccccaatctcaaaggctgttcaacaagcttaatctgaggttgagacgggttagcgaccatgataggttactaaaacttgtctgtttaatgacctgcatttggcgacctaacttgacgtacagtcgttataaaatccaccgtgtgagcttatcatattgataaacttacacggtggatttttaggtgctggttagtatgcgtgccaatcgacggattgaaaagcagcggtcagtcgttggatcaggtcggcttgggttggactaaacgtcattgagtggcggtacgcaacgccgacattgaacgtgggcgcttgcgcgtcagttagggggagccgctgtaatcccgccggtaattggacggcgttactcaataaggcaatgcccacatgctgacgaaccacgtttaagatactgccgatttcgttggattcaaagacaatcgttggccgaacatgattttgatgactgagttgacgaaacgcctggcggtggacaaagttatctttgagcgccacaaaatgctgatgacgcaacgatctgaactgaagttgtgagttggttgctagcggatcgtcagttggtacaacaatactaaatgactgggtgtcaaacgtcgtgagttgaatggtcgtatccgtgaattcattgaggtaagcaagtacggctaagtctaattgtccgttttttaatcctttgagcgccgcgagtgaaccttgactgataggttgaatctggctgaataaagcctgtggtaattgacttgcaatccggggaaagtagttgatttcaatgattggcggcatcccgataacaagttgatcggttgtggtgtgggcaacttcttggcacatcagttggtgctctaataggatctgattggcgtgtcgttggacttgaatcccggtcgtggtgagtgctacgggtaagtggggattagcccgaattagtaattgtgttttcagttcggtctccaagcgccgaatagcagccgaaatggtcggttgactaacgtgaaattgggctgcaactaatgaaaaatttttcagctgagttaacgaaacataatattgcaaatctttaatattcatcttaaagtccttatttaattgatgcttaattgttagtattatgatttgttattataacatggttatttgactatggtaatcgttgtggctattgtagggctattaagagagaagggaacgttgtacatgtttacgttcggagagttaatcgttattttagtcgttgttgggattgttgcgggtatcgttagcactgcagcggggttagcgtcgctggtttcgtacccggtcctactggcgctgggactgccgcccgttacggctaatgtcactaacaccgtgggtttagtctttactagctttggagccgtgccggcctcacgccgggaactacgggggcatggtcaggaattgaagacgctcatcccgctgactttagttgggagtattgttggggcaattctgttattattatcccggcagcgacctttgcgaaggtcgtcccattttttattttgattgcgggaattttagtgctgattcctcgtcatattcatattaaacagcccggtgaaattgttgtgacacctaaatggatgacggctttagcttggttgggcatctttttagtcggggcttatacggggtattttggtgctgcgggtggtgtcttgatgttgtcgatcctgtctttcacgagtgccgcaccattcgtcgtctataatgctcagaaaaatctggcgttgggattagccaatattgtttcagccgtcgtttatggcttgcaaacgccaattcagtggcgctatgtactacccttaggcattggttttctgattggtggtagcctaggaccacgaattgtacgccacttacctgccagattacttaaaattgtgattggaatcggggcattgggactggcggccagtttgttcaaatcggcttatggattgtgagtgaaaatgaagttagtggggacaaactcaatagcaatgttaaggctggtaaacttacttacgttactgtcttgaaattaagtcatcgagtctaaatcagcgtttgggctgatgctatcaggcaaaactgcaggtaacctgaaatggggagggcttgacccggttggctgatccctgatgatgaaacaaaaaagactttcaagccgtgccttgaaagtcttttttgattatcccaatgagaactttaatcgtgatggcgtgaacgtgtccctaaaaagtaagcaccaacggctaacagaatcagtaagctgataatgcccaagccgccacccatccacataaagggcataccgccagtaaaagcccaaccgcacatcatggtcaccactttcctaattattttaggttcagtatacgcgcttttgccaggtactaccaaccgttctgcattattttaagctgttgagtagttgactttgttcattggtggttaacggtaaaattggtaggcgtgtgcttccgactaaccagtgttgggcgttcagcgccgctttgacgggtgccggtgagggttgtgtgaatagtgctgccatcttcggcattaaacgtcgttgaatttgccctgcttgggtgatatcgccgtggttcaaggcgcgacgcatcgtcgccatttcatttccaaataaatgactcgccactgaaattgttccctgaccacccaagacgagggtggtcaagctctgagcatcttcgcccgtgtaaacgagaaaatctttaggcgccttttcaacaattgcggccagttcttcatcggaaccacattgtttgatcccaataatgttggggttgtgggccaacgtgagaatcgtcgtgaccgtcatcttaacgcctacgcgaccgggaatattataaattataatgggcaagtctgatttttcggcaatggctgtaaaatgcgccatcatcccggtttggttgggtttgttatagggcgggacaacgacgagggcggcgtcgatgccctcgatttgactgacaatgtgggtgaaatgaattgtggcggcagtgtcattggtccccgtattagcgatgatcaacgtggggccttcgccagtcgtgcccccgactaataagccgtccgtgccagttgcaagtaagtgttcgatcagttgctctaagcggtggaaatcaatgtgttgttggtcatcaaatggggtgaccatagcggtaatcaggtgtgcggatgctaaattcatgtggctaatcctcctgtgtggtagtttgggcgcgccataaggctaaacgatttagcccttcgcgtagtgccgattgactggctgcataacttatccggaaccaaccctcgccactcgtaccaaatgctgagccaggaacgacagcaacttgggcctcgtgtgtgagtcgggtcgcaaagtcccagctggtgccttggaaatcctgtggtagctggacaaagatatagaatgcgcccgtcggatagatataattgaatccaatttcactcagacgtttgacgacgtaatcgcggcgtgtttgatagacgtcacgcatttctgagccatcatccagaccatgggtaagtgcttcgataccagccgcttgggtgattgaactcgttgaagtaacgaggtactggtgggtcttcttcatctcggtaatcaagttacttggggccatgatgaatcccagtcgccaaccagtcatggcatgcgatttggagaggccattgattgtgatcgttttgcttggatatagtgtggcaaaagcagtatggggctgttcataggttagttcactgtaaatctcatcgctaataacgtagattccggcggtagcaatgacggcttgcaaagcccgtaattcatcatcagtgtacgtgacgccggtggggttggtcgggtagtttagaattaaggccttgacgtggtcgcgacggtgatcatctagcgcagcttgtaacgcactgggtgttaatttataacccgttgcggttgtgtcaatgggagctaattgtgcgtttgcgatgtcaacgacgggttgatagctcgtgtaagccggtgttggcaataagacggtatcgccaggattaagtaaagtgagcagggtcgttgccacggcttcactagcgccgactgttgcaatgatttgctcaggtacataggtgagttggtatttctgttgaaagtagtgactcgcagcatcttgcaaagcggcaaatcccattagtggcgagtagtgtgtccaatcattatgaatagcttgaattgccgctttttttacgtgacttggggtgggtaagtcaggttcgccgaccgttaatctgataatatcgggaatttgactgattgcttcatcgaagcgtcggatgccagagacttgaatttgttggatccgaatatttgtattcatcattaggaccttcctctcaacgtgattaccgtttataataaacaacaatcgtccggttagaaatagacaattttgataaaaatgaaaggacagttgtgtgatgccattaaatcgtcagtcaacgacaccgttatatattcagttataccagcagatgcgtgatgactatgatgctactcaagccaaccaccagttatggtcaattcgtaaaatggcacaaaatttgggagtttccaagaccactgtcgaacaagcttacgatcagttgctagcagagggctatgtttataccgttcccgggagtggctacttttatcgcgatcggacacactggccagcagctaaacaggcgctggagactgtgccacagcccactaaacccagggcgttcacttatgattttcggtatggtgtgactcagttgttatcgccaagttggaacgcttggaaacgggctgtccgactagcgttgcgtcagactgagcagcaaccaacggccgtttatccggatgcgcagggcttaccggctttacgtgaaaacttggttcgatttttgaaaacgactcgtggtgtgcggtgcacagcggaccagattgtcatcacgagtggggctaaggcaggtctcagtattctacttagtatcttgccacgcggaacgatcggaattgagaatccaggctaccgcggtttatccgaattggcggctagttatggacagacggcggtccccatcagagtgacggaagatgggctcgatttgacacaagttcgtgcgcgtaatcctcagatcatttatacgacccctggccatcaatttccattaggagtcgtcttgcccatcgagaaacgattagcgttgttacaatgggcggggactcagcatctcatcattgaggatgattatgatagtgaataccgatacagtgcgcacccattacccgcgctacagtcgctagcaacggctaatcaggtggcttatttggggacattttcgcggggaattgatccgacattacggatgggatatttggtcttaccaccacaactggtggcaacttatcatcaacggtaccaatatcgggctgaaatggtggccggcctgttacaacaagcaatggctaattattttgaagatggggcgtattatcggcaccttagtcgaaaccgagctgctaatcgacaaaagtatcgggtactttgtcaccagttagcgcaaactaagcagatccgaccaattgcaaccggcgcgggggtacacttagttgttcagattccaggcattgcacaggctaaattattagaagccctagaacggcaacaggttcggatttatccgcttaactccaattggcgcgacatgcccacggcggactattacttgttagggtttgccgggctgacactgtcagagttgacgaccggtgtcaaacggttgattcaagtttgtgaacaactggtagggtaggcgtttataagcggaatgggtggtgttagggattattgcgacgctagttaagctaatccgcaggcgcaatcccgaagagcaaaataaacgtgtattgccgatgggcagcaacccatccaattgttaaagcgatataaaaaggaccagttatcaacacgttgttaggcaagtgttggtaactggttcttttaattaagccatttaagtgaatacgctaggacggctagttgcggtagacccagcggtgaccatcttgacgtaataattcatcggccgcatctggtcccattgtaccagggcggtagtttggaaattcgggttgatgttcatcccagtatttttgaatgacgtcaacgaatttccacgaatcggcaacctcttgccagtgggtaaagttggttgcgtcgccatttaaggcatcgtgaagcaaacgttcgtaagcttctgggctaccagccgtggcttcagcatcgtgagaataattcaacttgaccggggtggttgcgaagccttggccgattgctttagcattcatgcggagctcgaagccttcagtcggttcaacgttgattgtcaagatgtttggatcgagactggttgctgcgtcgtcattagctcggacgtcttcatgattgaagatattgacgactggccgtttgaacaccacgtcgattcgcgtgaacttatcggctaagcgtttcccagtccggatgtaaaacggcactccggaccaccgataattatcgatcatgactttaccagcgacgaaagtatcggtgttagaatctgatgaaatcttatcttcgtcgcggtaagctttagcatcatcgccggcaccgtattgaccacggacaaagttggttgcgacttcttctggtttaagtggtcgtaagctccgtaaagccttgaccttttccacgtcgatatcattttcagtgaattcaactggttgatccattgttaacagactcaaaatttgcaaaatgtgattttggaccatatcccgcaaggcaccgctgttatcatagtaaacggcccgttcttcgacacccagtttttcacttaacgtaatttggacattgtcgatgtaacggttgttccataatgattcccaaatattattgccaaaacgaatggccgtgatattttgaatcatttccttaccaaggtagtggtcaattcgataaatctgattttcgttaaaagtagccgttaattggtcgttaagttccttggcactttcataatcatgaccaaaaggcttttcgataatgacgcggttaaaaccgttatctgtcagaatattttcggaacgtaagtgttgggcaatcgtaccgaagaagtttggtgccattgctaagtagaagatccggttgccttgtaaaccatattgggcgtccagcttttctgataattttttcaaagttcggtaatgttcagcatcagtaacgtcatgcgattgataataaaaatggctcgcaaattgcgtcaccgtttcctgatcagcattcagatcagctagggagtcactaataacttcatgatagtgatcatcagtccaaggacgccgagccgtcccaataacggcaaagtggtccttgagatagcccttttgatagagcttaaatagtgacgggtacagtttacgctgtgcgaggtcaccagtaccgccaaagatggtgaataaggcaattttttcgttactcatcaatttcacttctttactaagaatattttaaaccaagtacttgttcataagcattaattcagattaaactaccgtattaatattaaaccatacgtggtgatggtcaattataaagtactaatgttgcggagattttgggaactggtgtttcagttcacgctcagttgcaacgttttgcatgatcaaaccaaccgctaaggcgatggcttgaaaattaaagctttgcaatagcggaatcttgaacagaccaccaataatcgcgccgattaacaaaatggaaaagatttcgatgccaaacattgaatagaagcgttgtgcgaaccgccatgtttcctcattttcaatcgcacgtcgcgacatgtagccagcgagtgagcgcatcttaggcattcgcacgcgttgatagatccagagcaacagaatcactaggaagcctaacgccaagccaaagttgttattcgccatgttgtcacctcaattgttgaaagattacaccggttggcagtgtttaattatattataacaatcatcaggggtggtagtcgacaatcaggttcaaaaaccggacatttcaatattaatttttatggattgtcgaattaatattagtacaacctggttgagacagtttgaacttagtccaaattcatcatggcatcgtgaattataactggttgttaagtgtgctgggaagtttaaagtgattcattaaattaaattggttggtttgttaccaagtgtgccatggttaattgggccgctaaaataaaaatgaacgttcagaagtccttcgaactctgaacgttcatttttacagtgggactagctactaagaatggtgccggaagatatttattgagtagcaggattggttaatccgtcacgtgaatgacgattttacccgtcgtatggcgactttcgatggatcgatgacccttaatgacattggctacggagaacggtaatgtcgcaacggttagcttcacttgaccgctgacaactaagtgggctaagtcggctaggtcttgtgatgagccttgggtgaactgaaaggcaacttttttctgttgatcatgttgctgctcgtccgtcggttgaccggcaatggttgcaagctggccgtcagcttttaggaccttgagaccagtatcaatatcaccaacggtgtcaaaaacggcatcatagtcgtgcaagacggcggcaggatcggtttcatggtaatcaatgacttcatcggcccctaggcgagttaacaagtcacggtgattagcactagcggtggtcgcgacgtaagcgccaaaggctttagcaatttgaattgcaaagaggccaacaccaccagctccaccctgcaccagaatcttctgtccggattgcagcttaagattgtgcttcatgccgtaataagcggttagtccagcgattggcaaagcagcagcttgatcaaatgataagcctgctgggagatgggctaattctttagtattaacagtaataaattcaccataagtgccgttattagctgcgtgggcaggcgcggcggaaccaaacacagcgtcaccgatgttaaaaccagtgacggccttgcccattttggtaatgacaccagcgaaatcccaacctaagaccaatggaaaggcccataagtcagtaaaaggtgaggatagggctcccatccggccagcaatatccatgggattgagactaaaggcgtgaatcgcaacttgaacttcatcagcttgtggttcggtcgtgggcatgtcgaccatcgtaaattcatctgcggaaccgtattggttaatagcaattgttttcataatatcgtaaccttctttgattaagtgtgccgttagtataaactatggtgtccacacgatagcaagtaaaaagtaaaaaagttggttaatgatttggagaagcttcaaagtaagcaatcttatgtgctaaaaactgatcagttgcctgtaattgagcgatttgctttttcacagtagcacgatatgcgctcagttcttggattcgctgggcccggtttggaatgttgccgtcaccgctgagtagttttagatcaaggcctaattgccgaaaagtggcaacgaattgtagacgctctaaattttgacgtgaatactgtcggtagttgttgtggttgcgtggtacgggcccaatcaactgttgttgttcataataacggagggcgtccttggtcataccggtgatggcgacaacctctttggtactaaatgccgtttgttcggctggaatggtgaaaagtctcatgtcaattgctcctttttgactttagtatacacgtggtcagtgcttctcggaacaatactaaaacggatgaaacggatccgcggagtgggggccgcatttagaatgcaccaaatggtcaaagcacgggcctaggctgcgactacagcgttgcgattgtaaacaacatgcagtgtaagacttgatgctaagcgcggcttaagtaaaaatgatttcgtagactactcagcaccttttgcgacctgattggtaggtaaaaacggtcaggcggcgtatactatttagggtattgttttctcaatgaataaacttaaatcagaaatgtggtgaggagatgcaaaaagaagttcggttacggtggctgtttctagccaatttgctgaataatgcgggtgccgcttttatgtggccattaacaacggtctacatgcataattatctcaaacaaagcttgacgttttcgggaattattctttttttgatgtcgttggctatgattgctggtaactttattggcgggcgcttgtttgatcactggcgaccatattatacagcgctacttggtggtggtatttcgaccgcaattttaacaacgttgattttctggcatagtttgtggccttacgcgattggcttgatcattgtcggctttggtgatggtatcagcatgacagtcgtcaatgcctatgccgcaacggtaacgactagatccaaccggtatgtttttaacatgctttatttagcactcaacgttggggtcgttattgggacattattggtcggttacttgttggaactaggtatcaatgtggtgttcatggtggcaacagtttgctaccttggccttatggcgattacgctaagtacctttaacgtcacaccgactgttcggacagagaaagctgcgccgcagaagcgggatgtgacgcctaaaaatcaccgtcaattaatctggatgatttgtttgatgattttcaccatttatctgagttatgccttatgggaaagtattctttccgtgcacatgaccaacttggggattccgttccgccggtatagtgaagtttggacgattaacgggctattaattattgtgagtcagccgatcgtggcgttattcaacgaacgatttaagattggcactcagattggcttgggcattacgctatttgccttatcattcttgggattagtgtttgcccggcaatacgttgattttattattatcatggtggttttaacgatcggtgaggtcattggcttaccgattgcacccgcctgggtcgatgatgtggcggctgatgatcagcgcggaaaatatcaaggtcgatacaacatggctttgtcattgggacgagctgtgggaccattgttcggtggcatgatggtggctcagttctcctactcgttattgtttattacggtgactatcttaatgttaggtagtttggcgttagtcttgtggcgcgcccggcgagaacacttattaaatggttaaggagcaggtgggccccgtgatattaacaaagcttttaaggtcaaatgccttgaaagcttttttgattctttgaaagtgatgatggagacgattgacgatacaatttgagcattatcggatagaataaatgaattaattaataaaatgaggtgagtacgtgaatttgatggtttccagttttattctggtgttggctgcggttgttagtatttttatttcccgggtaatgccgcaaatatctgtgaactacttgagtctgatcgtcggtattggcttgttttttattccagttttgagcaatcatattgaaaacttcaattctgaaatctttattggcctgattgttgcgccactcctgttttttgaaggacaagccactcgactgaatgctgttggtaaggaattaaagcacattatccaaacgacagctggactagtcattcttgccttaattgtcgcgggatttagcttggcagggctgggattagtcggcttgccgttagcttttattctagcggctatcagtacgccgaccgacgccacggcaatggaatcggtgacgaacggtttggagatgccatcaactgagggaacttttttaaaaatggagtcgttgtttaatgatgcttctggcatcatcttattgaacatggcggttctctggtatgctaatggctatattaactatgggcaaacgattattgattttattatttcagctgtgggtggggtactctttggttttgtcagtgcctggatcatggttctgtttcggcaagtattgttacgctcttcgtataattcgttgaatgcgtcgctgttgatgtacgtgattacgccctttattttgtattatgctgctgaggcgattcacgtttctggaatcattacggttgtggttgcgggattagtgcataatgcggaagcccaacgaagccggttaattaatgcacaacaagttcattttgcttttgacttggtgagcatgattactgaaatctttaatagcatggtgtttgtggttcttggattcatgtttatcaaaattcttgttaacgaacaattcgggcatgggtccttgaactttttgttgattgggcttgttctgtatattagcaatgtgctggtgcgttacagctacggtcggttgcggttgagtttcaaaaatcggcccgcatggatttttgcgctaggtggcgtgcacggtgcggtaacgctggccttagcctatacgttaaccgatactgcggtcggacgtggtgactttaacttggttctaatggctgccagtacgttgattattctgagtatggtcgtgccgacgattatttttcgctggttgctaaagccggcgttgactgatgatgaggcaactagtgagattgatcagattcgggtggcgatggttcaccacgcgattgatacagttcagaaaatgtatttgccgccgaatgtgaaagaatccgtcatttttgatttgatgacccagaaacaacggactaggactcgtgattttgcacgggcctgggttgacgttgttcggcgaccggaatttactggtgcagaaaaagaattagagatgcgggcatttatgaatgcgctcgaacaagaacggcaatatttggatatgatttcacaacgagaggtcaagtatcagaagtacgtttttaaattgtacaatgaaaccttattagcggaatcactagtcatcggccccacgatatttgataaggataaggcaacggaatagcgtgaaatcgtcgttactgaggcgattggtcaacttcgtgctgtgaacacaatcaaggtccaagttagcgaaaactaacttggaccttgattgtttggttaattcgattaaaaggtttgattgtctaaataggcggccaaacggtctttcatcacgttatagacgcgttcagtatcaacggcagtcccgcgaagctcataatccgcaatcatgtccgtgtcaagttgttcagcataacgccgagcggttagacagtactgatcgttaaagttacggttaccagaaccaacaactccgagacagaaccgtgagttttgatcgtagttaagatattcacctaacacgttggtcatcaattccttaaccccattgtcaatgccgttaccaccgtcaaggtaggttgggacaaaggcgaagtagggttcagtctcaatggcaaagtctgactgttcggtgatttcttttaaggtaattaacgggttgctatcatcagctgcatgctgggtcttggcgtaatcctgcataccggtgacaaatgagcgggtattgccttcaatggagatataaatgatattgattgttgattcactcacagcagttcctcatttctgttttacattagttttagtttacgctgggcactacttaattgcaaacgactgcggctccgaatcgtcgcagtttgtcgtgataacggccggcttaagataaacttaatttttagtaggctttcccttaaatcaaccgcatccaatttatgtacaacaggttagtggcaattcacacgacttatcatataaaagtaccaaagttgaccagttgaagttcgccggatacaaaaaaatggcccctaagaaatcaactttcttaagtgccattttaagtagtgcgtgtaaatatttagtcttgtgtttgatcgtcattatgatcgtcaggtgtgctatccgtctgggcgctaacctcaaaccaattgatataagcattttcaaaatcaagcgctttgaaattgaagttaccgatttgaatcgtatcaccggcttggattttaggaaaattatccaaaatataaccggtcaaagtgacaacatcggaatcttcaaattcttgtaagtcggtcttgaagtagcgttcaaagtcgtagatggtcatcttaccactgatgcggtaagtgccatcggcctgcttttcgatgtattcgttagaaacattgtcgatttcgtcattgacggttccgaaaagttcttcgtaaatatccttatcagtgacgatcccactggtcccaccatattcatcaaccacgacgacgatcggcgtttgtttgtcgatcatcttttggagaatggcttgaatcggtgtagtttcaggaattgtaatgatattacgcaataacttattgacccgaatatcatcgtcaacttcaccttggcgaattaagtcatagttataaacgtaacccagaatcttgtccttatcattgttagctacgacgggtaagcggctaaagcgtttctgtaaataaacgcgaatggcttgcttgacggtatcgttgatatcaatcacaactagctgagtacggtcgatcatgatatccttagcgatcttgtcattgaactcaaatgcccgctccatgtaaaggtaatcgttacgttcaagctcaccgccagttacggcatttcgtgatagattaagaatttcggcttgtgaataaacatcgttatcttcattcgcaactgggatgcctaacattttgacgacgccagctgatgagacattcaacaaccatacgaaggggtagaacatcacgtggaaccaccgtaatggtgtcgtaataaccgccattactttgagtggcatgtcgattgcgatatttttaggcacgatttcggttaagaccacttctaagtaggtcagtaggaaaaccccaatgacgatactaatacctcgtaataccgcggttgagacggataggttgaagagggataagaaatcaagcacaaaatgttcagttgtttgttcacctatccaacctaaaatgataccagctaacgagactcccacttgagtggttgaaagatactcgttaaggttgcggaccatgtgcaaagaagttgcgatccgttttgacggtttatcacgttttttttgttcttcttcgagagcgctagggcgggtctgaacgagtgcaaactcacaggccacaaagaaagctgcgacgaagaacgtaatgacaataatgactaaatttaaaattatctggccactgtccaaagaaacattcctcatttcataaatattagttactttaagtataacgcgaagtagctaatattataaggcctatcacccgttttgtcagcccccgtgacggttaattaattggtctatcgtagtcagcgggcctgctggcaatcttttaagcgccaataatgcaatcgcgagaaagatggttaacgtttccaatgaatggtgctaaactaagggtataccaagtaaagggagatctttaatgatgccagtagaaacgaaaactaagattcatgaggattcgaagaaattggtttatcaagatagtgatgtcaaaaaagcgatggatttaattcgtgaccgtggttacgtgacccgtgcagatttcaatcagatggacgatgcggattgggcggccggttttgatcaaaagattgaagccgctttcctaaaagtggaaggcgaagacccgtacatctacttcgaacaatttgatttcaagggtggcgacattgactcaatcatctttgatatggatcaagttggcacgcgtgaccatgccttagatttacttgctgaagccattcaccaacaggcttactaagaattgatttgatacggaggttattgacatgcgccagcaattattcggtcatcatctggatgatctactaaagcccaccaaattattgaagcgggctcaccgggaagcagagaacgtcttaaacgcacacgttgggatgaaaacggacgtggttgaacatgacgatgattacaccgtaacggcagaattacccggttttgataaggacgctattacggtgaagtatgctgacgaatggctaactattcgggcgcaccggtcgcaagacgatcgtaacgatgacgggcgcgtactccatcgcgaacggatggacgcggactttacccggaagtttcatctaacgaatgtcgtgcgcgaagagattcaagcgcattatcaagcaggactgctgaccgtgacgttgccaaaaaccgttgcggatagcgaaggtaagatagaaatacaataaataaaagcatcgtcagcgaattctgacggtgcttttattcgatacatacacattgatggcaacggatttttttgcacacttaggggtgctgttagcaaggtgctgtctcaactagttgacagagctagcaatcagtcgtgacaacctagtgagcacgaatctgaaagtctgtagcataaccaggtaccaattcagcgcggggtagtcagtgaacatcggtcaccacctgagcagcttattagcaatcatgatgtgatttaaagtgcgagcctacttttgctcatcagtcgcatcgtcattggtgtcttcagctttattagcgtccgagatgctcatttgaatcgtacggggacggtctttgataataacaatcgtcccatggccgaggaagtctttgggcccatcataggccatttcatattcattggcgaatgagccggatttttgaagtgtcatgaagaaaattttattgtcttcgtagtcgtcactgaacatgatggccatcgtgctatcaatcaataatttctctttgcgcatcgctttgagacggtcccaaagtccggcaatcactgcttgtggaatcaattctttaacatcatcaccgacacggagctttttggtcatttcatacatactacataacctacttttcatttgtatttgcattaacccataaatgataccatattcagaaattaatgtgatttacaatgtcatctagtttacaagactagttaatctaggtataattaatgtaacctatttatcagaggaggacgcagcatggcagctaatgagacttatgcagattggcaagcccgcatggcaaaggtgattctgccgaagtggatcgagttaccgaactttgacttatatatggatcaggtcctattattaattaatgaaacgttgcagccattaggtgctgatccagttactgccgcaatgatcaataattatgtcaaacataaagtgatcttgtcaccagtcaagaagaaatatcaaattatgcaattggcggatattattgtcattagcttactaaaaccgagttatccactggataaaattcgtcagggaatcgaccaagtgactgcgactggctatcccaagcgagcttacgacaattttattacggtattaacgaatcaacttcatcatcccgatgatccaattacgatttctgatcaggatctcagtcacagtttaacaaccgcagcggctcaactgattgttaataaattgcgcacggatgaattattgcgacttaatcaagtacagaccaagccacaacaaattgaaaaataagctgaatgcggtggaccaagtaatgtcagttatttggtccatacgtgtttttttggttgctggaatgacggggctttagtatcatataaaatgattgtaagcaatttaaattgggatagagtggatcaacagtggtttgtttgttaatctgctttacattgggaagagtgattgatatgaaggtgtttatcagtgacgatcaagaacaacagcgtctctggttaaacgacatcattacggcacagctggaggcattgcactttaattatgagttagtctcagtatggcagccgaccgatgtgttagcggcggtaaaggatggcggcggaccaaatctttattttttagatatcgttttacaacgcgaaatcaatggcattcaattggcctctaagattcgtgattatgatcctgatgggtttattgtctatgtgacggtgcgtgatgacatgatcccggatacattgagtgcgatgacaacaccaaccgggtttatttcaaaaacaaatatgttcgataaggcaaagtttgttccagaagtacaaagagtcctacaagtcgtaaaaaaacggttaggtatgttacagcaatctgctgaaccgactttaacgattcgaagtggtgcgttattattaacgctgaagcttaaagatatcatctactgtgagaaggaacatgggctgcggaccacgcgaatcgtgacgacgacccagtcctatgtcgtacataagaatttaaatacgattaaggaacaactgacagcgatgcatttttttaatgagtttcaaagttatgccctcaaccttgaccatgtgattacggttgattttaataagggcgtgattagtatggacaatcatgatcacttgacctttagccggggaacgatcaagaagttacgggcgtactaccagacccagggataggatgagtgtatgataactgaaacacaattaacggcaattcaaacgtatgctttgcaaaagcttgctcacgatcatagtgggcatggtcgcgatcatttgcagcgggtcaaccggctagcacgccggctggcaaaagccgaaggggcaaatttaaatctgactttagcggcagcttggctgcatgatgtgatcgacgataaattgatggccgacccagcgaaggcgcatcaagatttgattgctcaattgaacgcgcaaaatgttacggctgccgatcaaacggctatttttgcaattattgatcacatgtcattcagcaaatccttcaacggccctcaaaaattaagtcttgaagggcaagtcgttcaggatgcggatcggttagacgcgattggcgctatcgggatcgcccgggcgttgtattattcaggtcatgtcggtgaaaaaatctatgacccggcaattgcgccacgtgaacatatgacgcgtgaacaatatcgacaccagcccggcacggctatcaatcacttctatgaaaagttgttcaagttagcagctctcatgaatacggatactgccaaagcactggcagcccaccggacagcggtgatgcacgagtttgttgaccaatttaaggctgagtggacggcggatgataaggcgtaatggcatccctacgtctagttgagtcactagttctttgagctgagatcatgttatcagatgatgcaattaccatttatattggctaacgaaaaaggccatcacaagaatgtatcgtgaattcttgtgatggcctttttagctcttattctggttttaaggctggcaatctaaatcaggcacggttggtcagaagatgggttaccaacatgactagtagggacacgagtagtgagtaacccaagataatggcgaccattagtccccaagtaactaacgtatggatccaaccggtgataccgatgaacgtcagtaaggtagtcagcacgataatgatgacgatggtgctatacaacccgatcgcactattctgatagtcagcgggacttagatcgaagccaccaatcacaatgacgagggttagaaagagcaacattaatagttgccaccaactcgttggcgtactggttaacgagtgaaaacttgcagcccattgtggttgttcgggtgtatcagctaatttgaagatggcttgaaataggccaggagcgagtagccagtctagtccaaggagtgccgctgtgcatccgaagatgggggcgacaccaatgaacaggttaccaatgacttgataccggctgtgccgattccaagtatggttaacatagcctagtgccagatcatccgccgactcatcttcaggatggaggtgagggcgtttgagcagccggaccgattggatgccgtggcgaaaaatcagtgcgaggattagatggctaagctcgtggatgatgatgcccagaaaaccacagtagacctgactgttaataccgtagtggttgaccagattcgctttggtttgtcggttgataatcgtcagtaaccaagcaaatagtccgggtaaaccaatgatgaccagcaagacgatgccgttattcttgatcaagttatccacgaggctactccgttattggaccaaaagtgccgtgcacgagcttgcgtagatcatcagcgtcgatttcaattgaacgcccgattttacccgaagatacgagaatcttaccttgctgcttagcggtctcgtctaagtagatgggaaacttcttagtttcccaaataccaactggtgtgttggcgccgtgttggtatccggtagtccgttccaagtcctttaatggaatcatgccaacttttttgttgccggatagcttagccaattttttatagctgaggtgctcatctaacggcaagacgccgacgacgggaccggtcttgttaccaatcagcgctaaggtcttgtagatatgatgttcgtcaacaccgaggtggtcgacttgtaattgttgaacgtcgccttccgtttcggttgggaattcatattgttgatagctgatatttgctttatccaaaatcttttcaacaagtgttttacctaattgatcttttttcttcttttttgacattattgttaacctcacatttattaaaaatacggtccaattttataaatggaccggaacaattcacccaaacgccattaattctgctatacttgaggtatgaaataacctcaaaggagggattacaatggctgacctagtttatcaacaagtcatcaatgatctcaataaacggatcatggcgaatgaatttgttgataagaagcttccagatgaacgtagtcttagcgaacagtatcaggtaagtcgtagctcgattaagcgcgcgcttaacgtgctagccaataagggcctgattttcaagaagcggggttcgggaacgttcattaatccattatatcttaaaaatcaatcttcgtttaagtatgaaggaactaacctaggaattacggacagtttaaatactgagggtgctaagcccagtattcaattattagactttcgcgtcattcctgcaagtcaagagttgcaacaagacttatttttaactgctgacgagtttgtttatgaaatcaaacggctgcgattactggatgaccagcctttcatgattgaaagtggctatattccaatcaagcttgtgccccagttgaaccgacaagtggtcagtggatcgatctttaattacgtgcaaaagaccttgcacgccgcagtgaccaaatcattcttatcgattgcggccgatgcgtccaatacgactgatcaagagttgctacatttgcagccgaatgaaccggtgggcctgatgagtgggatcttctttttagatgatgggacaccctttgaagtgtctaatatgcgattacattatcaatatatgaagtatacaacgtttgtgtcaacgaatagttaggagtctgaggtgtcatggcactgattcgtattaattttatggcggctagtttacaccggaccgttcccctgatggtgtgtttaccaactgataaattggttccagatgagcagggcgtgccgcgcccgattcagggtccgtttgccaccctgtacttattgcacggtatcttaggtagtgaagtcgactggattagtggcacacgaatccagcgctgggccgacgaacggaatctggctgtcgtgatgccagcgggcgagaatagtttctatactgatcatccttggtctggggagacgtatagtcaatttattggtcaggaattgattgattttacacgccggacgtttccactatcacaccagcgtgaccaaacttttattggcggattatcaatgggtggttacggggcgctgtataacggactaaaatttcacgatacttttggggccattgtgagtttatcagccggactgaatgtgcgacccggaatggaaaagttaccggcaaagcctcagtggtttgcggaaacagtcgcatatcagcatggcgtttttggcccagatctagcagctgctggtcattcagaattaaacctgcaagtgctcgtaactaaattactggcagctcacgtcgctttacccgcgatttttatggcgattggcgatcaggacggcttaaagtcagcgaatgatgaatttgatcattttctaacgaccaaaaaagtttcgcatgaatatttggtcggttctggagcgcacgagtgggatttctgggaccgctatctattaaaagcactgaactggttgccactaactaatcagggcgccggtgttaattctgggcatattaaagctaattgatgggctgcttcaatcattctgcgtacaaattattaaaaaatatattaatctaaaagcaaggtgtcccaagggatgagccttgtttttttgttttaatttataaaattggaccgttccaattaacaaaaaggttgattttttgaaatgagttgttaaaatagaacttgtaaacgaaaacatttaaacagttagcgttcaagtgaaaagcaaattaaggagtgtttttgaaatgacaacagattactcatcaccagcatatttgcaaaaagttgataagtactggcgtgctgccaactacttatcagttggtcaactttatttaaaagataatccactattacaacggccattgaaggccagtgacgttaaggttcatccaattggtcactgggggacgattgccggtcaaaactttatctatgctcatcttaaccgggtcatcaacaagtacggtttgaagatgttctacgttgaaggtccaggtcatggtggtcaagtgatggtttcaaactcttaccttgacggtacttacaccgatatttatccagaaattacgcaggatgttgaagggatgcaaaagctcttcaagcaattctcattcccaggtggggttgcttcccatgcggcacctgaaacacccggttcaatccatgaaggtggcgaacttggttactcaatttcacacggggttggggcaattcttgacaatcctgacgaaatcgccgcggttgttgttggtgatggggaatccgaaacgggtccattagcaacttcatggcaatcaacgaagttcattaacccaatcaacgacggggctgttttaccaatcttgaacttaaatggttttaagatttctaacccaacgatttttggtcggacttctgatgctaagattaaggaatacttcgaaagcatgaattgggaaccaatcttcgttgaaggtgacgatcctgaaaaggttcacccagccttagctaaggccatggatgaagccgttgaaaagatcaaggcaatccagaagcatgctcgcgaaaatgacgatgcgacattgccagtatggccaatgattgtcttccgcgcacctaagggctggactggtccgaagtcatgggacggtgataagatcgaaggttcattccgtgctcatcaaattccgattcctgttgatcaaaatgacatggaacatgcggatgctttagttgattggctcgaatcatatcaaccaaaagaactcttcaatgaagatggctctttgaaggatgatattaaagaaattattcctactggggacagtcggatggctgctaacccaatcaccaatggtggggtcgatccgaaagccttgaacttaccaaacttccgtgattatgcggtcgatacgtccaaagaaggcgcgaatgttaagcaagatatgatcgtttggtcagactatttgcgggatgtcatcaagaaaaatcctgataacttccggttgttcggacctgatgaaaccatgtctaaccgtttatatggtgtcttcgaaaccactaatcgtcaatggatggaagacattcatccagatagtgaccaatatgaagcaccagctggccgggtcttagatgctcagttatctgaacaccaagctgaaggttggttagaaggttacgtcttaactggacgtcatgggttatttgccagttatgaagccttcctacgcgttgtggactcaatgttgacgcaacacttcaagtggttacgtaaagccaatgaacttgattggcgtaaaaagtacccatcacttaacattatcgcggcttcaactgtattccaacaagaccataatggttatacccaccaagatccaggtgcattaactcatttggccgaaaagaaaccagaatacattcgtgaatatttaccagccgatgccaacacgttattagctgtcggtgacgtcattttccggagccaagaaaagatcaactacgtggttacgtcaaaacacccacgtcaacaatggttcagcattgaagaagctaagcaattagttgacaatggtcttggtatcattgattgggcaagtacggaccaaggtagcgaaccagacattgtctttgcagctgctgggacggaaccaacgcttgaaacgttggctgccatccaattactacacgacagtttcccagagatgaagattcgtttcgtgaacgtggtcgacatcttgaagttacgtagtcctgaaaaggatccgcggggcttgtcagatgctgagtttgaccattactttactaaggacaaaccagtggtctttgctttccacggttacgaagacttagttcgtgacatcttctttgatcgtcacaaccataacttatacgtccacggttaccgtgaaaatggtgatattaccacaccattcgacgtacgggtcatgaaccagatggaccgcttcgacttagctaagtcggcaattgcggcgcaaccagcaatggaaaacactggtgcggccttcgttcaatccatggataatatgcttgctaaacacaatgcctatatccgggatgccggaactgacttgccagaagttaatgattggcaatggaagggtttaaaataagcagttaaaatcttaatttgaaaatagcgttgctactggcctgtgcctccagtagcaacgctatttttgtgcgctattaattgtgtcgattggatactgtcacaagtgctgattggtgctggaatgtagcctatgacgtcttaatcagaacctagctaactgacgtttaatcaagaagcaacttgcaatgactagcataatgtgaattgtgagcatattttaattggtttttaattattcctgttataataacgctacctaagctgatactagtgatggtgattagttaaggatgaacgggtctgacgcaatcagctcagcctaacatcgtcgattccggttccatgaaccgagtttatgtggaaaggagcgactggttgtttaatcgccagtcaacgatgctaatgaaaattttgataacagtcgagaatttagtgatggatggtgtcaaacgagcggcgacggtcctcggcaatgcgttgacctcgcaagccgaagttgccttttactccttggcccaaccccggtctttctatgaactgagcgcaccgcttatcacggcgcgccggcctgcaagtgcgacggtacttaattactttggcgctgatccgttgaccgtttatgcgcctcaaatagatgatttactcacgacgattgggtcgggagcttacgatgccgttattctcccgggaggtttactgacgagttttgctccggcaatcaaacagcgttttccacgggtcaatgtcattgcgtggatgcacaataatgttgatatctacctcaatcagtattacgtccaaatgcaagatgaactggtcgcagggctcttagcggctgatacggtcgtgacattgaccgattatgattgggaaggctactcacgttttaacgcccatacggtcaagttctataatccaccgaccatgcaagctcatggtcagcaggccgacttggcgcaacatatcattgcctacactggtcgtattgacctgcaacataaggggctcgattatttgttgacagttgcgcgagccttgcccgatgattggcaaattgcagtcgcggggactggtcccgaagaccaattagcaacgttcaatcggttgatggctgaactcgatgttcgtgaccgcattatttatcggggtgcactgaaagatactgagttacgggcgcattatcaacaggcgagtgtcttcatgatgacttcgcgttgggaagggatgccattagttatgggggaagcgatgacgatggggttaccgatcgtctcaatgtggaatactggctcagccgagtacttgcagggtggccagtacggtgtgttgactccggcccgcgatgtgaatgctctgattactggcttaatgccactgttaactgattttgaatgtcgcgctgaatatgccgcgcgcgctcggcaacgcagtcatgactttaccttgagcaagattgtccggcagtggctggcactattgaatcgccaatatgttccgcaaacggtcgtcgaatcaaattggcctgcggatttgagtagtgggggacattagcctgtcatagcggtcatgataatcgctcagtacctaggacctgaatggttggtgctgagcttttttgtcattgatggtggggattttctttggatagaactattatataaaaattatgaattctattaatcaatttgcaaacgcgtgacgactttgatacactcaatcaaaaggtcagccgtgcctgaccgcattggaggagcttgctattgaagacaacgtggctggctagtttactagtcacaatcttttggggcgccgtattggggctcgttgtaacgtatttaggtggggcgatggtcgaggctttgaccgccacccccatcgttcgtgaaccactcaaagccatggcggtgggtatcatattggcagtgatgagtgggttattagtgacaacgcaccattaagaactgtatgctggctttaagagcgcttagccgaccgttaacaagcttgataaattaaaaatgattcgccttcttgtcagaggaaggtgaatcattttttagtgtagatgaatcacggggttcaatggtgaactaactgtccggagtgcgttgcgcaaatgctcacgatttggatagtcggagtagtttgagtaacgtaccggcaagttcttcacgttgatgggctggcagatcactcaggtagtcgagtaatgcaacaacattaggtgattggagaagctcgtcgcgaaagaagtccgctatttttaaattcagagtttcagcgattgcggtcaaactttgtagtttaatgttatcgaccttaccacgttcgagtcgagaaattagcgagattgaaacattcgattgttcggccaattgctcgatggtgatgccgtgttgctgtcggcgttgccgaatgattttgcctatctcggttaacatgggaatcctccttaatccattaagcgtcttagcactaattttagaggtttcgctatgcttgaaacagagctgtaagtaccttataagtaccgttataaggtcattaaagcttttgatacgtgatgctaattaaatcacgttactttgctttcagttatcgaactcatgctgaatttgtgatccgttgaatgtgacaaagcaattattaggttacggttaatgataaaatagcaacatactataaaggtctttaaatacttcttttagtcgtatataatgttattaaagctttgttataacgctattaaataattagtatagcttgcaaagcagaatagaaatcagagtgttgggaggagcttatttcatcggatgtcaaattaatggaggagtgtaccaaaaatgaaaatatgtccaaattgtcagcatgaaaatgaggctgataatgttttttgcgaaaattgcggagcggatctgactcatattgacagtgctgaacgaacgcaagccagtggaacggagcagaaactcggggattcaaggcaatatcaagctcataaaccagctaagacgcagcaatcaaggtggttgcgaatcagtggaaacgtgctcgcagtcgtcattattgtgggaggtggatttgggttttatcaatatcacactggtaaaaatcagcagattgccgcggaagtcgaaatgatgactagtaataagcccacgacattgtcgaaacacttagttagcgataatactgggttaaaaatcacaaaacagtccgtaaagcccttaatgacctatatccaaaaacatccccagtacgcacaagatctgaaaacagacttacagcataacggttattctagtgatcacacgtttgttgttaagcaaatcggaactaagtggacactattcccaacttacaaattacgcgtcaccacgatgcagccgttaatcacgaccaatctaaaaaatgccacactggaagcaaatgacatcgaattggtgaccaccgaaagtgcgcatgccacttataaggttggtccgctgtttccggggacctatatgtttaaactaagtaattctgacacgacaatcacgcacaaggttaatctgatggggcacgcgaacgtccatgaattaatttcgttagttgcgaataaaaaggcagcgacaacgtcaacggcgaatactgacaccaaagctaccactgccagtgatgaatcagactcgagtttaatcaacagcgagaatgaatcgcagagtggtacgggcagtgcttatgatgatttgtctagttcagctcagacagctatgtcagaaattgccgcggctaccggtggggatattagtgattatgattatacggcgagtgaaccacacacggatgtgtatgaaattaaatgctatgttagtggtactaatgatttagcagatacttatcgatatgatgatgttaatgatattctagcgcgctacaacacgagtaccggtaagtttgaaacggtagattcaaatgattaacgagaaatttatgattaatttggaggatgtttaaatgaataagcaggcacttttttgctcgcagtgtggcaatcaactgaaagccggggcgaagttttgcccgaaatgtggtgctgtggttgccccaaaccaggaaattccggatcaagggcagtcagttgccgaatccgagaatacggttgaacgtagtagtgatgataccgtcaataaaattttgaccacagataccgtccaacatgtcaaaaagttctctggaagctacttttcgtggtttaagatgacgatccggcatcccggtcatccgattgaaccgactaatcggtactttggactaacttcgatcggtcttgaggcctttttactggttttatcaattgcgttaatcttacgtaaggcacaaaatgtcgccaatgattttactagttcattgactggtggtagttcggaagctgcgattcatgctggcagctttatcctaaaaacgagtatgctggtgtttttcatgtttcttgggatatatgcgatttatgttagcattgcctatgcctttcgccgcgttgttaatactggttcgatgcaatttagtgattttatcaatcaatttgcagcaattacgaatttgattctaatctttaatctactcacgttgcttttgacgattctcactggaactggtaatttttctggcatgactggattgttcttctttatgatcccaaccatcgggattatgaatctggcatttatttatatcattattgataatgttgtgaagccccatattgacaaattttatgcgttaatcattgctgaaatcgcattaggttttgcactatctgtttatgtcatgatattagccgttttaggtggcaatatgcttttctcacaactatcgtcactattttcgtaagcgttagtaccgtcggattaccgccgtgacggattagttaatttttaaagagacgatgccatggattcagagcggaaaaaaaggggaccagattttgaaaaaaagtgaaactgtctgtatcagtctgctgttactgttatttattagcggttgtggtagctcacagcaggcctcgcaagcgtcacatgcggataagaagcatggcgttagtgtggtcaaagtgaagcccaaagtgattactgataaggcgcacaaaacaaatgatgcaactaaggcaacgagtacgtcagtcaacgcaagttctcagtcgacaaaaataacgtctcaacaacgaggggctacgactatgaatcttaatgagatcagtcagggctcctatgggagtttgttaggtgactggaaggaagttgctagtagtgtcaataagcatgatactaagggcgatgtttggcaatctcccgaggctggcgctaaattaaccgtaaaagacacgaaaatcagtgacggtgaaatggccttagcaagcgggaaatttgaagatgcgaatggtgatgaagaggctgttactactaccatcaaacaggaaaaaggcgcactgcatatcgatggtgatatcggtgcagctgccgtcacgtactggttttatccaaagggagttgcaatcagtggctggggtgataacgttcctgccaccattaagacggatactgagcgaatcataacgcgcacaagtaataattcttatgtaaaagtttttgaacgtcaaacgaccgccgccaatacgggaaactgcaagtcgacaatggcgctcggccagattaaaactggtgattattcaagtttgaatgggacttggcaaaatggacaaggaaatcaaatcaagattcataatcagcggatgaaatttagagattttggcctgacgcaagacgctactccggggacgattactaaactcaaaatggatgtgccatcattagatgatcagcaaggaaattctaagacggttgatggattgaagtatcatcaacaattaacttatcaaacctcaaacggtgccagcatgcttcaaggcagtttttcaatatcaggctcatctggcggactttatgatgtggtatttatgcccggtggaaataatgctgacctaaataatggtgatagtagtcgggaccgtattgcggcgttaggaacgcaaaatgatccccaaaacattccaagtgataagatttattatcgctcaaattaatagtttagaggcataattaagctctttgtggctaagataaatatgcaggtgtcaaaaaaaggaagctcactgagcttcctttttggacccttcaagatagatactttcataacagtttgatggcaagcgtcggtagccagctgaatgaagttgaacttgcttagtcagtagcgctcaattaaatgcggactattaaataaacttggcaatggggccggtaccgtcacccgtgtggtgctaaatggaagttgtagatccaacaattgggcatgtaacatcagccgaggtgccgactccgcttgcgagtcgtaaagtggatcaccgataatcgggtggtcactggcggccaagtggacccgtagctgatgggtacggccagtatgcagggtcagtttaactaaactctgatgggcggttgttgcacatacttcgtagtcggtgagtgctggctgggcatcggccgtgttgacccagcgtttgcgtttgtcggtagcatcgtgaccgattggcgcggtgaaatgcccagttggcgtggcaaagtgaccacgtacccaggcataataagtccggcgaatttgcttgtcactgattaagcggtctaaaatcgggacgacgaccgggttcaatgcgactagcatcgcaccagaagtcatctggtcgagccggtgaaccatgtatggcacctgctgagttggttggagtgtggctgctaggtcatttaaaattgatccggtttcacctggttgattaggatgcgatttcacgccagcgggtttatcaacgactaacagatcgctgttttgatataaaatcgtggctggggccgtggcagccgcaatatagttcgaggtcggagtccgaaagtcactggggataaacgtcagcgtcaggcaatcaccagtattgacgagttgtgcaatcgacgttggtgtaccgttcagctgaatccgccgcgtttggcgtaactggccctgaatccgctttggaatcagccaagtccgaaggcaagcccgaatcgactgttgattcaaactagacgggatagtgagttgataagtccaggtcatgaataaagctcctttataacggggaagaagacgggcaacgcacggaaaccactaaaaaagtctggaacgtatccagacttttttgttagtcttcttttttagcggtcggcttaacgatcaaaacgtcacaaattgcgttgcgactgacgtaggtggttacggaaccgaccatcaaacgttcaacggcagataagccggttgaaccaatcataattaattcattatggtggtcagcgggaaattcacgcgcgataaccgttttgggattaccaaaacgaacatggacatcaacgtcggtcaccccagcgtcaattgtttgttgcttgagttcttccaagcgcttttgaacgtcttccgacaacttgtagatgacatcaccactgaccgcaccgccgtacgtgtcactaaattggttgacttccaacacgtttaaaatgtcgagatgggtcttgttacgcttagcgacttcgatgccccgccgaagaacttcgtcggtagccttggagccatcaactggtaccaggatattttgatattgttgtaacataatggttacccccgtttgatatggctagttaataactatattttagcattaattttcagcaatgtaagcatttaaaatcgatttatgattaggtacgtttagctggagtgtctaagtaggtagcaattgagtaacaatagcaaggaaagcatttttcgaggagtattagcaccagtgatgattatctgcgagtgaagagattgggattgatgtagctgttattactcaacttttagcaaacaaatacgtaattatgaagtatgtactaaggaaataccgactaatatattgagatacggttgtttgaatgttctaacaatagtggatagttatggtgttatattttgcaattgtgacgtctcaaaacgatgtcacaataacattatatgttttgttaatcataaatattaacagtgagtagtttatttaggctattaaagtgctggacttttattttacgcaaattggcaatcgtaacgggccgtgataaggtttaaactaaagttgatatgtttgctttacgtaaaatgtaagtatttataactataacgaagaaaagaaacttgtttgttgttagcattaaaacatctgaaatctctaaaacatgaaaaagatcgtcaatgtaagcgttgacatatcgagaatagggtggtttaatattgatgtaggttgttataacaacatgacaagtcgtggagataaaaacaaaatggctagttcaaaaattgttccactttatcagagcatgcttaatgatttgattcgtcagattgagtctggtgagttggtagaaaatgctaagttaccatcagagcagaaacttggtgaaaagtatgatgtttcccggattactgttagacgcgcactagcagagctggaaaataaagattatatttacaaaaaacaaggacaaggttcgtttgtaaaaaacaaagaggacattgatttaggtattcattacctagatgtccgcaaagcaattgaaaatatgaatgctgttccagaaataagacttgaagcgtttaaattgattgtggatggttcggagtctgatgttcgaaaagtaatggaaataaactccgatgtttatttgtattatctacgttatatggtttatgcagatcatcgacctgtcttccatgaacaagtctatttaccttttgagcgcttcccacgtatttttaacagcgagattgttaataatgatttgatgccttttttggttaaaaagtatggactaaaggctagtttcttttcacatactcaacctgcgttaattactaaaagtaaccggaaagaatttgacttaaatgttggcgatccaatgatttatatgcagacacgtggaatagaagagaaagaaataatttactatagaaaagcagccgtggtaggaaatctgattatgtatatcgtaggttaattactatccgctgtgaatagagggataaatatgagtgaaccaaatattgtgcttacaagaatcgataaccgactagttcatggacaagttggtgttgtttggacttcctctgttggagccaatttattattggttgctaatgatgaaactgccaatgatcaattgcaacaagagctgatggcagcaactgctgaaacatctggagttggaattcgattttggacaattgacaagactatcagtactattcataaagcaagtccgcgacaacatatctttttggtgattcgcaatgctcaagatgctcgtcgattagtagagggtggtgttccagtaaaaaatctgaatcttggaaatatgcatttttcgaagggaaaggtccaagtaaccaagtatacttatatggatgatcaggacaaggctgatttaaaatattgtgcggatcatggtgtgaatgtttatgttcaagaagttccggaagataaaaaacaacctttggaagaggtgatctagatgcaagtcaccttaattcagggtctcctgattggactatttgctttaattgcaggtattgatttttggctagagggcttgtatatatttcgaccaatgatcgtatgtacagtgactggtgctattttaggtaatctgactcttggtattattgctggtggtttaacagagttagcttttgctgggttaacaccagttggtgggacacagccacctaatccaattatggcaggaattatgacagtcgtattggcgtataccaccggaaaaacaccttcaacggctattgggttggcactcccatttagtattttaatgcaatatatcattttgttttattattcggcgttttcagtccttactaaaaaattagatgcatatgcggcgaatgttgaaactaaaaaattcacaagattagcgctgttacctacagtacttgttgcattaacatatggtgtgattgcttttctgtgtgtttatggtgctcaagaaccaatgaaggcattggttaattctatgcccgtctggttaagtcatggctttgaaattgcaggtaatatcttacccgcagttggatttggattgttgcttaaaagtatgttaaaagctgaatacgtcccatatttattacttggttttacagcggcgtgctttattaagtttggtaatttgatgccggttgcggtaattgggatttcacttgcttttattgagttttatcacaataaaaaacaaaccgataacgagaaaaaacttaaatcaatgattgaaagtgccagtggaaacggagatgatggcgatggcatctaattcaccaatatcagaacgaggtagattaacgaagcatgatgtacgaatgcttggttggcgatcactgtttaatcagtctgcaatgaactatgaacggatgcaggcagatggttggacattggcaatgttgccatcactaagaaaaatttatggtaatgataaagagggcctagctgctgctcttgaatcaaacttgcaatttattaacactaataattatgctgcaccgctgttgatgggtttagaagcatctcttgaagaacatggcgaaaaaagatcgacaattgacggactgagaattgcattgtttggtccattggctggtatcggggacgcgattacatggttcacaatcttaccaattgttgctggaattacagcgtcttttgctaaacagggcagtattcttggcccattagtttttttcctagtctatttagcaatgtttgtagcacgggcgccaattgcattattgggatacaacgccggcacaaaagctatttcaaaaattcgcgaaaattcaggaatcgtatcacattgtgctagcattctggggtgcactgttattgggggattaattgctacttatgtacaaattgcggttaaaacaaagattccagtttcagcagggcatacgattgcaattcaaacacaattttttgatcggattttccctaatttattgccattagggtataccttcttattgtattggctattaaagaagaaaaatgtgagtcccgtagtcttaatattaggaacatttatgttggcaatccttttctcatggatgggggttctttagaatgaagataatagttagtggacacggaaattatgcaagtggactacaatcaacaattcatttgttagcaggtgatattgccaatatcgagtatatagattttactgataacatggatgatattcagcttagtgagcgatttcaacgtgctgtaattggtgagaataatgttgtctttatgtgcgatttactaggtggtacgccattcaaggaagctgttaagttaagtcaagtgagtgaaaaagatattgcggttacaagtggttgcaatgttggtgcattgcttgaagtgggttttgagcttacaacatattcagctccggctaaaaaattggctgaaaaattagttaaaatcagccaggtacaaactaaagtttttcatcatcaagctattcaagttgatgatggggtagaaggtatttagcgaaatatacagattgtccgattaacaagttatctgttgatcggattttttgtttggaatatgttattttgaatagaaaaagtgcacattataaatattttgatgaagataaagaattatgacttttttggttacagagtgtttttttaaaattaacaattgtgagtgaagtctattggataaccagctatctttaattagtttcaagtgtttaaaagtgaagttaattttaacaaagttaatattatcaagggatttaggcaagtaacgatactaataatgataactaactggtaattggttaataatttaaaatgataacggtgtcaatcaattgatattaataaaataattcgaagcgatctcgtttgaatgtccctcttcgacatgctaatattattctgtaatagcaggtgctacaggggaattaaatcggttgtgttaacagctaactcacggaaagtttggggattttaaaattgaaaattggaatgacaaaaaaagtagtaacttcattattgctaagtaccgctttgctgccgatgttgagtggtaaagctgatacggcaagtgcaaatcaaaaactggcagctgcgactaagggaaacagcgctgcttcagctgcaagccaacaagtgaccttaagtgctggcagtcagacggaaacgacagcggccggtgcgactgaccaatcagttgccagtgacggtgccaagactgacgatcaagctgaatcgaccagcacgacgacggctactaccagtgcaacaagtcgtgtcacagtgcgggcagccagtcaagccgctaaagctgacagtacaggaccgcaaagccagtcctccgccagtgaagctgccaaggataacgcggctgctagtgctacggcggactccacaactagtgctgttgatcaacttgataaaacggccaaagctagtgcagccacgagccaagccagtcacagtacgactaatgagacggctaaagccagcgcggccgcaagtcaggatagtcatgtcactacggaccaatccagcgcgactgtgacgagtgaagtagccaaatcagccgcatcgtcagccgcacctaagcaagcgactgagcaggcggtagccgcgaaaatctcaccaaagattgagacggctgtggcggctgatgcggtccagtcatcagcgatgatggcacggtccacgcgggcaatgactagtcaggaaatcttcctgagtcagattaaagcgggggcaatctctggttggaacaagtatcaagtcttgccatcagtcacggccgcacaggcaattctggaaagtggttggggacaatcacaacttgcaactcagggaaacaacttattcggtatcaagggaagttatcaagggcaatcaatctacttcccaacccaggaatggaatggctcacaatacattacgattcaagacgcttttcggaagtacccgaattggtcagctagtgttgaagatcatggcgcctttttggttgtcaatccgcgttacagcaatttaattggggttaccgattatcggcgcgttgccagtctcttgcaacaagacggctacgcaaccgcgccaacgtacgcgagttcgctgatcagcatcattgaatataacaagctacacgagtgggatcaagaagcgctcagtggtcaggcaagtggcggaaatgataataaccaagttcagcctgatcaagacgtcaccccaaccagtggtacacataagtttactaagacaacgacaattcacaatgcgccggacgccacgagtgccgtagtgggtacttacaacgctggtgaaacagtcaattacaatggtaagttaacggtcggtaatgcaacttggttacgctatcagtcctattctggcgtatcacggtatgtgatgattagtcaaacaacaactaatgataataataaccaggcgacagttacgccagctagtgggtcgtataagtttaccgcaaagaccaacattcgatcagccgcaagcaaaacggctcaagtggtcggcacttataatgctggtgagacggtttactataatggcaagattaccacgggtgggacaacttggttacggtatttatcctattcaggcgctcagcattacgtggctatgagtggtgatgaggttggtgctgtggctaaaccggacgtggttgcaaccagtgggtcgtatcgtttcacgaaaacgacagcaatcaagagttcacctgcaactagtgcgacaacggttgggtcttataatgctggcgatacggtctattacaatggtaaggtgacgacaaatggtcagacttggttacgttacatgtcttactcaggtgcccagcattatgtgcaaattagtggtgagagtacgtcgaccaatgttgataaaccgcaagtaacgcctcaaagtggtagttatcgctttacgcaaacaacggcgattaagaatacaccggccggaaatgccccaagtgtcggtacctatagtgctggtgatacagtctactacaacgctaaggtaacggctaacggccagacttggttacggtatttgtcttatttgggcgcccaacattacgtagcgattagtggtaatgccgctaccggaaatacgacgtctaagccggtaacaaacagtcaaggggcgttccgcttcgtaacgacgactaatattcgtacggcgccaagtacgcgcgcaagcgttgtcggtgaatataacccaggtgaaacggtttattacaatgggacggttcaagctgagggttacacgtggctccgatatctgagtcgctccggtgcaacgcactatgttgctaagcttgaaggttaggcatattagttgttccggcgtccaaatggctttatactaaggatattgaaatggaatagcgattacgaccgctattaatgtttcggcaacctagttggcttcggctgactaggttgtttttttactcggtttgcaatcgcttacattgtatgctatattggatttatcggaagagtcacaggtcaatatcaaactgttacccaattgttgtaacaaacccgtcaagtgatagctagtgcagtatagcagcgtttccgctaatttcggataactgactggcccaacctccatctattgatggcacggttatgtccacggagaacggattgccgccaatcaaacgttcacggatgtggatagtgaatcagtcatcttgtggtgtgaagaatgccacgccaaactttttgtatgattcttccaaaaaatgggctcacattgtgggtccttttttcatcttgctgtatgattaaagtaacctaaagctgaaggagattttaaaacatgtattatgtcgcaatgaaagatcatgagattggccgtaacttggcaaccgaacaatatttaatgaataacgtggatttcgatgaaccattagttttgttctactatgaagaaccgtgcatcattgttggtcggaaccagaacacccttgaagaaattaatgccgactatgtccgggaacatcacattaccgtaacgcggcgtctctctggtggtggggctgtgtatcaagatcttggtaacctctgcttcagctttgtggtggatagtgacagtcaagagtttggcgactttaagacatttaccaagccaatcattgatgcgcttcacgatatgggggcgacgacagcgacggtcagtggtcgcaatgatttgctcgttgatggtaagaaattctccggtaacgccatgtattcacggaatggcaagacgttctcccatggcactttgatgttgaatgttgatttaaacgttgtcccacaggcgctaacagtcccgaccgacaagattgcttccaaaggtattaagtccgttcggagtcgggtcacgaatttacggccttatttagcgccagaatatcagaatatcacggtgccagaatttcaggatgccctgttaaaagagttgttccatgttgattcgttggatcagattgcggataaggaatatcacgtgacacctgaacaacaaaaagctattgataaaatttacgaagactattatgctaattgggattgggtttacggtaaatcaccggaattctcggttaagcggcgtcaacactttgatatgggaaccattgatgcgcggatctcggttgatgacggcttgatcaataacattaaattttatggtgatttctttggtagtggcaacgttcaagatattgaagccgcccttaaaggtgtgcggtacgaccatgaggccatcgctaaagcgctggcagatattgatttaaatcagtacttcacgggaattgaacggtcagccgttattgacttaattgcccaataataggagtgatttgttgaaactgactcgcttagttgcatttgcgtttgtgtcctttttttgttacggtatcgtcaattggatgatgtcgactagccattttcacctgcaggcaaaaaatatttcggtagcggaaatgtggcaggggttgctgattgccctagtcttatattttctaggcgttctagcagtgtatattaatcgtatgctgggtttttacgtcctagggttagttgtactgatatatagcttaggacttgtcagcgccttaatgtcgggctatcagagtacggctggcatggaaattaaactggcgttagaagttatgggtgtgattggattgggaatcaacttttatacgttggtgttactgactcgctggcgacgtgcaaattaacgaaattgaataatgaatgagggataatgttttatgcaacgaaacgtacaagcttttattgatgatgttacggctgacaaggttacgcaggatagcttgactggtacctatgccaaactagcgaccaaggttaagccttggctggcgaagctggtagcggcactcaatgccgaccagcttgcccaagtgacgctgacggctaagcatgagccagctatcagctttcggttggagacgagtgttattaatttgccactggctaatctgaccgaaattggaaaggttacggcggcagaggatacgctgccaatcaacgtttacatgattgcagaatccgatgcgttaccgtcaggattgcgaattgatgagctgggaagcgttgccgacgtgctcgctgatcaagccaacgctgaaaagttattaaccgattggctgacggctcagactgatcgcttagaccagatcacggcggcggaagcttaaacgtaatctttacgagttaattactaaatctttacatgactatggtaaggtaagaattgatattggagccaagccaaaatcaaaataccaatggaattgagtgtgtcgttcattaaatcgaacgggatactcaatttttttggttgcgaaaagttaagtactgcggcccaactgtggtgagtaggagccacgaattttgtggcggtgcgacttgcattttatcaatgaagatgatatggtagtccatgcgatgagtcgatagagtcagatcgttagcaataacggttccgcgcgagcggctagtgactaatattgatagcggggcacgtttctctgacgtatttcagagtgtctgggtcactgacattgtggagtgtcactcccgctggttttaccagtgccgcgatgaacgcgtgttaaccattttcggatggctgacacgcgttttttttgcgtacagatcacgcataagactttcatagggtggactattcggcaaaagcggtggtcgactggatagtcgtaaaataaaacggacggccatcaggataagattatcccggcgaccgtccgtcaatggactgaaagattagtcctcttcgttcattgcagctgctgactcggtgttagcagttgcccgttgcatttttccaagcacaccgcgggcgattgggccgacgatgatgagttggagtggtaatgcaacaatcaagttaaagatccaagtgtgaccgtaagtcgctaaaacgtgacttccggacaattcaccttccactgcaatcccgaagagggacatgcaagttaccatgccaagaaccatcaagacggagatggtaatcccaatcaagacaacccgtttgcgcatgtaatcattaatgatatatttgaaagctaatcgtttggcaattggtcccacgaccaataagtctaaaatgatggcaacgaataaaccgagtgggtagccactaaggattgccattactaacccgttgctgaaaccttgagcaagggtaacgttataggcggtcatcacaaagaccattaaaccggccataatggcggtaaagacaacttcttcttttaaattacgtggcattctattcacacactcctagtttttttgtatcggttgattactatagcatgcgaagggggcctcacataagtaacaatttgatgacaaattatgaaacggttacattgttagcctgttttgggccgtagtcgggtgtcatttacgatatacttataaggggcagtatgatggcaaaatgaactttaaagaaataaggttgtggaaacagctttcaagttaacaaaattcatttctgctgatgccacggttgttgttgaggagatacgtagtcaagaaaaggatggcacaatgaatcttaggtgcccaaaaatggaccaactgagccaaatataatttaaagttaaatttcgatccagaacaggtaaacgttggtaaagtgagacaacatagcgtatgctgtagttagcatcagacaattaatctttggggagttgattatcttgaaaaaaatgttagttagttcagccgtgattgctgggatcattgcgctgggaggcggttattacttagaagccgaccatcagtctagtcagtcgcgggttagtgaaacacaatcagttgtgtcaaagactaaggctaaaaaagacgcgtcatcttcagcaaagtcgacgaagcaatcgacagctgctaaatcgtcgtcaactaaagcatcgtcagtttccacaacttcagctaatgagtcacaatccgaagctagtgcaacgactagtcagggtagtaagacagctactgcagctagctcgcagggacattcaaataccactgcaactagtcaaacaactaccgggcagtctgcatccgcgacctcatcatcaactagcggccagcaaacgaccaatccacagcagttaacagctagtcagattaatgattgggcttggcaacaagtggctaaggactatcaacaaacaaccgccaataagcaaaactttgtgtttaatcagtatcaaagcggtggtttagtttacgtggaagtttatgaaaataccaacgccgatgtcgcacacttagcgggtcgttttcggattaacgcccaaggtcaattggaacaacagcagttggctaaggggaacgtatggcaagttgttgcaacacagccataatggcgtcgtttagcaggttacaattgaaaaatagttattgccaattgggtgttcagcgggtgtcaattttgaacacctaatttttagtatcatcatggtcaatttggtagcttgattcagctgttatcacgggtaagtgccggcagggcccaaggtaaggtatgacaagctagcctagtgatgcctcagtaatttgaccaggatattgtaaccgccttcttgctcattgtgaccaaatacggcatactgaaagtagttcataaagattggtggctggtttgatggcaaaagagaaacatgaaatttatgacgaacaggataagcgactgggccgcttgattctgaaaatactggggatcgtcgcgattgtcagcggcttagtgggaccgttcatttacttattgaatgcaaactggggccgtgagctaggaaccttggccgtgatttgtggcggcgttgcgatttgtctgggccctaaaggtcgaactgcagggggccagtggttagccctcttgaagacgctggggttgagtattttgattttaggatattttgtgattgtcttgaaattattgggatagctaggcagtgtcgaatgcgtttctgtaaaaatggtggtcaggataatgctggcaccattttttattgtgctgaaataagattggggcttgcgctcctattattatgagagtaagatgaaaatatcattaaataacatgttgatgagaagagtagtcaggttatacctttgacagggagccgtggggagtgtaaagcggtaaggtagcgcctgatgaagatgaactcggaatgcccagttgcggtcgcaaggctgtactggcgggactggccgatactccagtgagtcaataatgacttgatgagtttaacggggtgacccgtaattgaacttgggtggtaacacgcgaccggcgtcccttgaagatggcggctttttttgtagtcatttttacactggcctctctgtagactgcccgaccataactagattggatgggattgagattatgacaaaacaagctgagaaattacacattgaaacgcggttagcacaagctggtaatcggagtgatgatgagaagaccggggcaatttcggcgcccatctacttgtcgacagcatatcgacatgctggtttaggacaatctacgggatttgactacccgcgcgaggcccaaccgacccgctgtattttggaacgagtgctggcagagatggaacacggcatcgctgcgtatgcgctgacttctggcatggcggcaatccagctcgttttcacgcttttcaatagtggtgacaaaattattgtgtctgatgacttatacgggggttcgtaccgcttctttgacctcttacacgaccattatcatttggattttgctgtctgggatgggcaggatcaagcgacattggcagcactggcagacgatcaaaccgttgccctgtggttggaaacgccatcgaatccaaccatgaaggtcatagatattacggccacagcggctaccgcacacgcccatgacctcaagttaatcgttgataatactttctatacaccgttgattcaaaagccactggatctaggcgcagacatcgtcgttcattccgcaactaagtatttagccggtcataatgatgttttagccggtgcagtggtagtcaagtcgcaggcggatgctgatgcgcttgaatttaatctggtgacgactggtgcggtccttgacccgttcgacgcttggctgctcttacggagcttgaagactttgccattacgtttgcatcagcaggaggctaatgcgcaggaactcgttacggtccttgaggcagatgaacacgttgaacgtgtcttatatccaggacgtggtggaatgattagtttttatctcgctacgggtaccgacgtcgatacctttttacgagcattgaacgtaatctcgtttgcggaaagtcttggcggtgtcgagagcctgttaacagttccggcagttcagacacacgcagatttaacggaagagcaacgacaatcaaaggggatcaccgctaacttattgcggctatccgttgggatcgaaaatagtgccgatttagcagcggatctcaagcaagcgctgatccgagcaacaaaataaagcaaaagactttacttacttttagtatgtggtaaactataattattataaagatattggaggcatttttcatggcaactgcaactttaagcgacgaagaaattcgcgaacgtatcaagacgggtaaacacatgttattctttacggcggactggtgcccggattgcgcttttattaaaccagtaatgccccaaatcgaagcgaagtacgatcaatatgactggatcacggttgatcgtgacgccaacattgaaattgcccaagacatgggtgtgatggggattcctagtttcgttgggatcgaagatggtcaagaaattggtcgatatgttgacaaattccgtaagacccaaaagcaagttgaagatttcttagatacacttgaaaagtagttttgaaaggcatgacgttagctgataactaaccgtgttaaaacgagccaactcgagtgcgtccatgatggttaagctttaaccacgatggacgcgtttgggttggttttcgtttgggcttctgctacactattaactattaattttggaaacggtgataaacatgacaacaaatttatttgaagatgtggtggtgcggacgaccaaatttggtgatttgcccgtattacacgtgtttgcagctagtcaagcacaaactaaattaccaacgatcatcgattatcatggttggacaaatcagacagcgactgaactgggtacggcttatcagttagtacgcgcgggttttcgagtcattctcccgacagcgtatttacatggcagtcgaaatgatgggactgatctcgatcggcatcctgaacatttttggtcgattgttggacattcagttgcggaatttccacaattagtcgcggccttagtggctgctggaattagtgatgctaataaaatcggtgtcatgggaacttcgatgggcggtattaccgctgccggcattatggcaacgcagcccacggtagttgctggtgtctcgttaattggttcaccagaaccggtggcctttgcaaccgatcaagttgcacaattaccagcggcattacaagctaagctcccagcagaactaattgaacaaacttatcaacaattggcaaagtttgacttatctgaacacccagaagcactggcgggacgaccaatgttctttttcaacggtacggccgatcaaatggtaccttatcagtatatgcgtgattttaagcaccgttttaaagatgagccagccctgaaggcaactgtctttaaacgcgctgaaggtggcgttcaccacgtacctcacaagattcaagaagctgctgtcgccttcttggagaccaacattcttaaataatgcacacagcacccacactgttcataaaactgaacagcatgggtgctttttattgccatcaataccataaccgtcggacactatgatagcctaaatcgcctaaaagtagtggttctgacagtaacattagacaaccgcgttccagtaagaaaatcgcgagattcatctcatcatcccagcgcgcgacccgttcgttgagccggcagttgtatcttgagcttgcctttagagccagtgaattcattttgagagggttgtggcgcaagcggggaatccggatgaggagccagggataggctagcaggtcggaactgatcagccaataaacggggagactaaaggtcagctgccactgtccggtcggtttcgcggtaagcgcatagtacgtcattattaaaacggggagtgctgacagttcggcagtcagaatattaattgctttatctttcatcattatttcaccttgctgattggttagattaagccgatggataagcgttcgatattttccagaacaacggcaggctaacacgatttcggaccagtgtcaggtcatcgaatttggttagttaagaaaatatttataaaataatgattgtttacaattgaattttgaacaatttagatgtattctgataaccgtaaatgaaaacgtatacaataattttaaaaagaaggcatttactatggcaaagatgattgaagcgtctgttgcaatgttaaaagttattgaagcttgggatgttaaacagatttacggctatgctggtggatcgtttaactcaaccatgcacgcgttggatgttgagcaagaacggctccaatatgtgcaggtacgtcacgaacaagtgggggccctcgctgcggcagcggatgcaaagttgacgggtaaaatcggggtcgcctttggatcggccggtcctggtgccgttaatttactcaacgggttgtatgatgctaaggaagatcacgtgcccgtacttgccttggtgggtcaagttgctcacactaatatgaactatgattatttccaagaattcgctgaagaaccgatttttagtgatgtggcggtctttaatcgaaccgtcatgacaccagaaagcttaccatacgtcgtcgataaggccattcggacggcttatcgtgaaaatggggttgcggtggtgacaattcctaatgattttggatatgttgaaattcctgatcttaattacgattcagcaagtgtccctgctaaactgaccggcattcctactattgatgatgaacaagttaagacggtattaacgatgatcaagaacgccaagtaccccgtcttccacgttggtcaagggacgcgtggtgcaaccgaggacatgatggcgttagcggagcgtctgcaagtaccgattattatcactgggttagccaagggcgtcattcctgatagttttgatggtaatatgggaagcgcttatcgggcagcctcgaaagcggcggatgaactgatggggattaccgatttggtcgtttcagttggcgcagattattcgttcgcacagattatgtacacgactcacgacttcaaatatgtgcaaattgaactggatcctggcaagtttggtcggcaccatcatttggatttcggggttaatggcgatgctaaagtcttcatcaaacgggccttggcattaagtgaaccagcgtcaccgtcgccatactaccaagcggctaaagcagatatggctgactggaaacagtatttgaagaagctgagtgaacggacgaccgatccacttgaatacgaacaagtctaccaagaaatcaaccgggtcgctgccgatgatgcagttttctcaatggatgttggcgacaatacgattaatagtttccgtttcctaaagatgaatcccaagcaaaaattattgacttcagcactatttgccacgatgggtgccggtgttcccggtgcgattgcggcgaagatgagttatcctgatcggcaagccttcaacattgctggcgacggggccttctcaatggtcatgcaagacttattgaccgaagttaagtatcacttgccaatctttaatattgtcacgtctaaccaaacgttgaactttattaaatcagaacaagaagatgtgccgcaaccatattatggtatcgacttgattgatgctgattttgctaagatagctgaaggaatgggcgtcaaaggtatccgtgttgaacattttgatcaactgcacgcagccttcgaaactgcgatgaccgaattaaaggctggtcgtccggtcctaattgatgccaagattacggacaaacgggggttaccagttgaaatccttgatgttgatccaaccaagacatcggatgcttctgtcagtgccttcaaagaaaaatatgacgcgaacgaattgaaaccactaaccagttatttcaaggagttcaacgtcgaatagtcagtgtgaacgagcctgcaatcaattgattgcaggctttttcgttctaggataggtcaggaatgattgttaaaaggttccggttaactcgattcctgttcgtcagccggtgcgcgtcctatgccgactggaaggcgtttcggtcaatgctcagcggtgaaatttcacttagcaagcgtcctttgcttggttagtggaagaccagtatttaagacgtgggttgcggcttaaatctgtgtccaccgcgttccagcaattgacggaaatgcctggaagtcggcgtaggacgcgtttaaccaagcatgtttacgctgattcgaactttttccagcgggcctaactggttacttttgatcttaaaccggaaccttttaacaatatttcgtgcagaaaaggcttggtattatgcggatataattttaggcgtcattctgcttggtctgggagttttaaaagcggataatgaagctaattctagggggagtgatgaggatgaagcgacggttaattgcagcgcctacgggtcttttattggtgggatggttgattggctggggcttgcaagcaatgcaccaaccgatggggacggcttggacggcctacgcgtttacgttattgatcttatatacaattttggcgacgtttatcactagtatggcggatgcctatcagggaaatcatggtcgaacagtaccggaaaaacaattttactggtatatgtgtacgttatcagtcattttgacaattttagcgatttattggatggcacacaattagggggattaatgctaatgcaagatgaaagtgattggttaatgcggcagttacatgcgttcgcaacggggttagggtacacgcttagtcgtcataagggaggcacaactgaggtggtgtttccgcaaaatcaaaatcagccgttgccacatcaagtcgaattggcacaactcattgacagaaaggcttatgctcaagccgctcagcggttgttagcgttgcagtttgcaatgacggaagctgaattcttgcagctcggaatttggttttatgcgacgcttaatcaatttgacgaccaaagtctcgctgccgggggaatttcacgaacatcgttggtggcgggattggaacaactgcaacaattgaaaatgtgatgctaagatttaagcaaatcacgaatgaatttggcaaaaaagagattcagctatgacggaaaaattaaaagtcgtgctctcagaatttaatcctgaaagcacgacttttaatttaacgcgtgttcaattatcggatcacatagacgtggtcatgaatcaggtcgaatggtcggaaatgagcatttaacttggtaacggcctcgttatcctgataattagcgtggtcccaaaattgtttggaacccgtggcgccgtatttttcgccaatgacgatcaatgggatatcgtaaggactttgccgcatagcttgtaacaagtcccaatcaatagtcaatttgtccggtgaccaggccataatgacgtatttaatagttgcggcgtacttattgaaggcactgacggcatccaacgcttcaatcgtcgtgactgggtggcgtcccgtctgattgccagtttcgtgtgtccaatcctttgaatccgtggtataaattggctgaccaggatggagacgtttgaggcccttggaaatatagccgttaccggccatgacttccagaactggtgcgctgccggtgaagtcagctaggtctttcagaaatggcgcactgatgtaggcccacatcccatactgatcttcgatatagtctcgaaagttgcgtagaagttggtcaacttttgggagagcggctgatagttggttccaagccgcatcaccagcaggatcacccatggcatattgctgattgatgcgctcaaagagatggtcctgaaaatcatcagggatttctaagactggcaattgttggggagctaagccggctgccagcaagcggtcactttccaagacattattgatcagcactagaatttggggatcatccttaaataagtcgcggtacttcattaactgttgaatatacggggcaccggcttgctttttgacccgcttttttaattgttttaacttcttgggattcataaaaaactcctagtcatcaaagtgtaagtctaattcttcttggccggtcgcatccgttgaaactcgatgctggcgaccatgtaagtaaccatccatcaactgaaacagttcatagcggtcttcactggataattgttcttgattaaacgtcaacggcttgcccgataaaaagatgcgaccgaggtcatactcttcttggtctgatttacctgacaagtaatcggtcgtgacgttgaaaaattcggctaatttacgaacttctaggtaggacggggtccgtaagtcccgctcccagttaccgatttgagccgcggtattttgacgagtcgtcttgtctgcggtcggcatttgattgagggccgccgcgagttgagcgagggtcattttttgcccccgacgtagtgctcttaaacgttctggaaacatgtgctcacttccattccttagattaacggtgcggataacgccatgaattcatcgatgtcccgcttgatcaaagctacaccagcttgccagaaggctggtttggtcagatcaacaccgaggtgtttggcagctagggcttcggtcgacatgttggcggtgtctcgcaatagggcaatgtagcggtcttcaaagtccgattgtgttttagcttgagcatagataccgagactgaaaaggtagccaaatgtgtatggaaagttataaaacgggacgtcggcaatgtaaaagtgtaacttgctagcccaaaacatcgggtggtaagtatttaaggcattaccataggcgtctttttgggcggttagcatcaagtctgacaaagtatcaggagtgacgatcccgtgctgacgggcggcatagaagcgcgtctcaaacaggaagcgggctcgaatatccagaaacatggctaacggattttgcattttagcatccaataaagttaatttggttttggcatcatcggccgctttgacactggcgtcagcgacaatcagttcggcgaatgttgaggcggtttcggccacgttcatcgcgtaatcttgacgccaaagtggcagatcttgaatgacgctgccatgaaaggcgtgccctaattcgtgggcgagggtggctgtgtcattaggtgaacccgtaaacgtcatgaaaattcgggattcgtgggtctctggtagattttccatatagccaccaggccgcttattagggcggttctcagcttcgacccaacgatgttcaagggcgtgttgggctaaagcgcccatctttggactaaattggcgaaagttgttaatgacaaaatcggcagcttgatcgtaagtttggttaggaagttgtcccaaggttagtggggcttcaatatcttgccaatctagttgatctttaccgagtaactgggccttacgcttcaggtaacttagtaaaatgtccttgctgtcagcgacaacttggtacattgtgtctagtgtcgcttgactcatgcggttgagttctagtggtttttgtaggaagttcgtcgtaccatgcgcacgataattggcaagtcggaagcccgccaagtggttcaacgtatcagcaaagggagcggcgtgagtttgccaagcgtgctcccagttgcgcattaattcggcgcgttgagcgttcggcatggcggctgctaacatgttttgagcttgacccgcggataggggctgggttattccgttttcatcggtatagggcacttgaatttggctaactaacgtgtcgtagtggtcactccaaccctgaaaaccgtcgagtgctaagtcattgattagggcttcagtgtcgtcatctaggagcgctaagccttgctgacgcatttcggttaagttaaaggcgatggcttgtagtgacggttgttgcacgagcgtgtcaaaggtggcttgatctaacttaacgagctgcttcttgaagcgggttaataaattgtttaactgattatcaagttgataaatttggttcaatagtggggcggctttggtgtcgtccgcatgtgcggattgataagcaaccacgaaaacggtagcttggtcaataccggcttgaatggcttgcagactgttgacgagttgggtaaaccagtcggcgtctggtgtgtcagcggcagcacgccagtgaactaaggtgtctgctgtcgtggtcaactgctgtttaatcgtggacatttttgcagttagtgctggggaatcaatgccaccagcaaagatactgtccaaatcccacgtttcggaatagtgcataaaaagaagcctcctcaatctggtctagttatctttaattataacggttattatgaagtagtggcgaaattttcccgctcaaaacagatttttgtctcatcaaggagtgaattttaatgaagaaatggtggaacacactgggggtactcgttgttctggtagcgggagctgtgattggtgctggcagttatttttaccacgtggcaattgcccgtggtgataagtcatttgttacgcagagtacaaagctatcgaaaaaaagttcggtttatcaccaaaagtattggtatttacatgcgcgtaagcaaacttggactattgagtcatcggatcatttacggttggttgcttggtatattccagttaaaaattctaagaggactgttgttttggcacacggatttgctgggaataagggtttgatgggtgcgtgggcggggatgtatcatgaactcggctacaacgtgctggttcctgattcccgagcaagtggtgcgagccagggaaaagcggtcggctacggctggctggagcgccgcgacgacttgcagtgggccaaaaccgtcgtacataaaacggccacaactcaaatcgtgatgagcggtatcagtatgggtgcagccgggatgacgatggccagtggtgaacggcagttgccacagatcaaagcgtacgtcgtcgatagtccgtttacgagtgctgatgcgattattagttatcaagcggggcaactctatcatttacccgcgtttccgttagtcaacgtaaccagtctcattactaaattacgtgctggttatagcttcaaagaggcggatgcaatcgctcagattcgtaaaaaccacttgcctatcatgattatcagcggcacccgggatgattttgtcccgactagcatgggcaagacgctgtaccgcaatgctcaccaacccaagtctttatggttggtgaagggagccggccacaccacggccattactcagaattaccaacgttacaagcgtcacgtcgctgcattcttggaacaatacgtgcagtaatgttagcttgcttgaattagcactgatttgtcatgaatcgtgatattaagaggccgtttgtttgattcctgttcgtcagcaataatcgtccgattccgacctctggggctgggtgacaattgctggaacgtaagccgacgtcgatttgagcccgtgcccaacccgccacgttccggcaattagcagaaatgcctggaagtcggcgtaggacgaactaactaagcaaggttacgctaactcgcactttttccagtggtccatagctggctgcttttgtccttgaaagttagcatcctaatatcacaaaagctcccaaatcgattcgatctgggagcttttgtgatattaagataattatgcccggtatgggacctggcaaggtacatcgacgccatctttgagtgtgatcaggtataactggtcaagcacggcggggccttgtgaatgacgagccccccaagtagttagcaactggtttaggcggctagcgacttgatggtggtccgcaacacagtctaagtcttgtgcggccttagctaaggcttgttgtaattcgggaattgcgcgtacttcggggtcactataagcgacatcgatggcgcgaattagcgcaatggcgttttcgttttttaacatgctaccatccctctcctgtgatgtggcgaacttagtccacgtcctaatttaagtatagcgctcctaaattgagattcaagttacaaatgtaaccgctatcacaagtaacggtagatcattattgtacttttggtatcagctgtgttatattgtaatagaaaaatagaacactaaggaggccgttaaattgaaatttgatgacaaggttccgatttattatcaaatcaaacagtatatttatcataaaatgattgacggaacgttaccaccaggggcaaagttgcccgcagtccggcagcttgcgttggacttgacggttaatgttaatacagttcagcgggcactcagtgagatgattacggaaggcactctgacgtcccaacgaggtaaggggaatttcgtaacggaagatcaggcgcatattatgcaattgaggactacactggtgaacgagcaattagcattagcgtacgaccaattgcacgcactaaatttaagtgacgccgaaatcgtggcgagtctgcaacaatacattgcccaacgagaggagcacaatcatgacagcattgacgattaaggatttacgttataaacataatcaacgaatgattttacaaaatgttcaattaaccctggcgcccagcaagattgtcggtttattaggtgaaaatggggcggggaaaacgaccttgatgcgactaattacgggtagtgccaagggtcagggcagtattgtgatcaatggcgcgacaactgccgtagcccgtaagcagcaggtaagtttcacggatcatttgactggttttagtgccggtatgaaattacaacaaatcgcgcaattttatcaacttgtttatcctgattttgacgccaaacgctatcaagagctggttgactttctggaactcaaccaacaacaaaaattgggtgagttgtctaaggggacccgcgagaaattaatcattgcgctgaccctgagtcgcaaagtggctttgtacttattagatgaaccgtttagtgggatcgacagtatgagccgcaaaaaaattattaacagtattatcaagtggacgcctgccgaagcgacattattgattagtgatcattatgtcactgaaatcgcgccgattcttgatgaaatcgtggtcgttaaggaccaaacaattgttgttcatcagggtgcagatgagattcgcgacgaacatggcatggaacttgaagattattatgagagcttatatatgggaggtgtgacggatgacaagtagttggtcactatttaaggccctcagttggccacgctttaagcaaatgagtttattgattggtatcgaagctttggcggtgattgtcactagtttgtggactgccatcaaaggaaacttcacagctgccacattattctataatttatgtgcttggatggcgttacctttaatcgttgggtttatcttattggcagtttcaaatgaaaaattcttccgggcggggacgttctggttattgccaattagcgattggcgacgctatacgattaatttagtcgtttcgttggttgatattgtttatgtttggttggtccaagtgattttattctgcttaactctgtggattggttggaatgaactgatgggaggcttaacatcagcgtcgctgttctttagccagtttgatgcgggtagtgccgtgcagttcgcactcggaacgttgctagtcttagttcttgtgacgattctgatttggagcacgataacgctttgccattttgttacgaatgcgaccaagggctttttaccacgatttcggcaacggttcgtcaatgtgattatcacggtggtggtcatttacgtagctttccgcttagctaatttgttgattagcatggtcagctttctctccagtcagctagtcaaccagggacaaatcgattctttatgggtcggtagtctcgtcatgttggcagttatcttagttgaaggtgtgttaaataccttgatgttgcaaaaatgggttgagccaaccttgaattaatttagtaatcctaaaaaatcactcattcgtattgaatgagtgatttttattgcgcattttttaaacgatggttgcacctaagctgtttttgaagtgacgcaacgcccattcgtgaccagcggcgtcaaaactagcaacggcatcctgatgaatgacgagttggtaacccaaattataggcgtcaacagccgtgtgaaggacacaaatgtcggtacaaacaccgactaagtgcagggtgtcaacatggcgttctcgcagacgtaaatccaagtcagtacccgcaaatgaactgtaacgcgtcttgtcgaatgcccaaacattatcggcggcttgatgatcagcgtaccaatctttgagtggcccatagagttcacgaccccaggtaccccgaacattatgaggtggaaacaacttgctttcgggatggtaaggatcatgcggggtatggacatcggttggcagtaagacccagtcgcttgccgtagccatttggttggcgagtttgacgatcgttggtgcgagcgcttggccgggttgcccacaagtgagtgccccgccgtcagccacaaaatcattcgtataatcaataatcagtaaggcttggtgacttgccataataaaggcctccaatattaggtttgagattggttttactgtaaacaactctgatgggactgtcaattgtttaactagcgttggattgactaaataattatattaatgagatttggagctataaggacagcagcttgctgaaagtcttttctgaacaataaaatattaataatattttgtggccgaccaaggcgccaggtatcgggcgttaatataaataattgcgaatggcgacttattagccggtgttctgtttgctaattgctgatttttgccccaaattggcacagtagccgccgtcctgttttcccaatcgttaaactgagattgggttattgtcagttaaatataaaaagtctagccagcgtgttgagttcgacaacatactggctagacttttggtgggtaaacgaaagttgagtcgctggcctgatgattattctgctagttgatcagtaattgccgtgacaatttggtcaggggtcagcttaaattcatgccgcagttcattagttgtttcacggtcattaaagcgtttggcagcaccaaagttcagaacgcgcatagcgctgttgccatagtagcgactaactttttcaccaaaaccaccgctgagactggcttcctcaaccgtgacaactaactgatggtcggcctttaagttggccaaagtcgtcgtatcgggggcagaaatgtcccggggatcaatgagcgtcgcgtcaatgtgttgctcagctaattgttgttgcacggctgttgctaaaggcaggagactgcctacaccgagtaaagcaacttgctgaccagcgtgtaatgtgtgcatcttagttgcgtcaaaatcaggcgctagaggtactgactggacgtcattacttggtacccggatggcaaccggaccgttattttgatggagagcccagtgcatcatggcttgaagttcttccttggtcgttggcgctaagtaagttaagttaggaatattactgagcatggcaacgtcaaaggtaccttgatgagttggatcgcctgcgttaatgcggccaccggcaaccatgatcgtaacgggcaatttattgatgccaagatcatgagatagttgatcataggcccgttgcaagaaggtaccagaatggaagacgattggccgtaagccttgttgggcctgtccggcagcaaatgtaatcgattcttgttcggcaatgccgacgtcaaagtaccggtctggatattggcgagcaaagcgtttgaggtcataagttcctggaacagccgccgtaattgccgtgataggcgtcttggctgctaactcatcggctaacgtggcatgaatgacatccgtatacgtttccttggtgttgggatgcaacgtctgaccggtcgctaggtcaaacggcacgtgccagtggaaagcttctttattagtgatcgcgggttgatagccgtgacccttttcggtatggacgtgcaacacgattgggtggtcaacatccttaatttccttaaaagtcgttagcatggtctcaaggtcgttaccatcatcaacgtagcgataatcgaggccaaaatctttgaacaagttatgggaact
